United States Patent Application Publication US 2026/0242798 A1, published August 20, 2026 (application 19/461,345).

The application's sequence listing, which the Patent Office published only in electronic form, follows.

SEQUENCE LISTING (1201 sequences)

SEQ ID NO: 1 - RNA, 21 nt, synthetic construct
  misc_feature 1..21: note = Ps178sense
  source 1..21: mol_type = other RNA
cttcagctcctgcacagtcct

SEQ ID NO: 2 - RNA, 21 nt, synthetic construct
  misc_feature 1..21: note = Ps2428sense
  source 1..21: mol_type = other RNA
ggttccgacttgtccctctct

SEQ ID NO: 3 - RNA, 21 nt, synthetic construct
  misc_feature 1..21: note = Ps2537sense
  source 1..21: mol_type = other RNA
gcctggaactcactcactctg

SEQ ID NO: 4 - RNA, 21 nt, synthetic construct
  misc_feature 1..21: note = Ps2610sense
  source 1..21: mol_type = other RNA
gcatttcaccattcaaacagg

SEQ ID NO: 5 - RNA, 21 nt, synthetic construct
  misc_feature 1..21: note = Ps2617sense
  source 1..21: mol_type = other RNA
accattcaaacaggtcgagct

SEQ ID NO: 6 - RNA, 21 nt, synthetic construct
  misc_feature 1..21: note = Ps2674sense
  source 1..21: mol_type = other RNA
tgtccgtgggcagaatgactt

SEQ ID NO: 7 - RNA, 21 nt, synthetic construct
  misc_feature 1..21: note = Ps2683sense
  source 1..21: mol_type = other RNA
gcagaatgacttttattgagc

SEQ ID NO: 8 - RNA, 21 nt, synthetic construct
  misc_feature 1..21: note = Ps2719sense
  source 1..21: mol_type = other RNA
ggcattcaatcctcaggtctc

SEQ ID NO: 9 - RNA, 21 nt, synthetic construct
  misc_feature 1..21: note = Ps2721sense
  source 1..21: mol_type = other RNA
cattcaatcctcaggtctcca

SEQ ID NO: 10 - RNA, 21 nt, synthetic construct
  misc_feature 1..21: note = Ps2723sense
  source 1..21: mol_type = other RNA
ttcaatcctcaggtctccacc

SEQ ID NO: 11 - RNA, 21 nt, synthetic construct
  misc_feature 1..21: note = Ps2725sense
  source 1..21: mol_type = other RNA
caatcctcaggtctccaccaa

SEQ ID NO: 12 - RNA, 21 nt, synthetic construct
  misc_feature 1..21: note = Ps2740sense
  source 1..21: mol_type = other RNA
caccaaggaggcaggattctt

SEQ ID NO: 13 - RNA, 21 nt, synthetic construct
  misc_feature 1..21: note = Ps2749sense
  source 1..21: mol_type = other RNA
ggcaggattcttcccatggat

SEQ ID NO: 14 - RNA, 21 nt, synthetic construct
  misc_feature 1..21: note = Ps2751sense
  source 1..21: mol_type = other RNA
caggattcttcccatggatag

SEQ ID NO: 15 - RNA, 21 nt, synthetic construct
  misc_feature 1..21: note = Ps2817sense
  source 1..21: mol_type = other RNA
gagtgtgaaaggtgctgatgg

SEQ ID NO: 16 - RNA, 21 nt, synthetic construct
  misc_feature 1..21: note = Ps2824sense
  source 1..21: mol_type = other RNA
aaaggtgctgatggccctcat

SEQ ID NO: 17 - RNA, 21 nt, synthetic construct
  misc_feature 1..21: note = Ps2836sense
  source 1..21: mol_type = other RNA
ggccctcatctccagctaact

SEQ ID NO: 18 - RNA, 21 nt, synthetic construct
  misc_feature 1..21: note = Ps2880sense
  source 1..21: mol_type = other RNA
ctgattaatggaggcttagct

SEQ ID NO: 19 - RNA, 21 nt, synthetic construct
  misc_feature 1..21: note = Ps2884sense
  source 1..21: mol_type = other RNA
ttaatggaggcttagctttct

SEQ ID NO: 20 - RNA, 21 nt, synthetic construct
  misc_feature 1..21: note = Ps2892sense
  source 1..21: mol_type = other RNA
ggcttagctttctggatggca

SEQ ID NO: 21 - RNA, 21 nt, synthetic construct
  misc_feature 1..21: note = Ps2971sense
  source 1..21: mol_type = other RNA
cctgagccacctttactctgc

SEQ ID NO: 22 - RNA, 21 nt, synthetic construct
  misc_feature 1..21: note = Ps2978sense
  source 1..21: mol_type = other RNA
cacctttactctgctctatgc

SEQ ID NO: 23 - RNA, 21 nt, synthetic construct
  misc_feature 1..21: note = Ps2984sense
  source 1..21: mol_type = other RNA
tactctgctctatgccaggct

SEQ ID NO: 24 - RNA, 21 nt, synthetic construct
  misc_feature 1..21: note = Ps2986sense
  source 1..21: mol_type = other RNA
ctctgctctatgccaggctgt

SEQ ID NO: 25 - RNA, 21 nt, synthetic construct
  misc_feature 1..21: note = Ps3057sense
  source 1..21: mol_type = other RNA
tcggcagtgtgcagtggtgca

SEQ ID NO: 26 - RNA, 21 nt, synthetic construct
  misc_feature 1..21: note = Ps3117sense
  source 1..21: mol_type = other RNA
tacacattcgcacccctactt

SEQ ID NO: 27 - RNA, 21 nt, synthetic construct
  misc_feature 1..21: note = Ps3119sense
  source 1..21: mol_type = other RNA
cacattcgcacccctacttca

SEQ ID NO: 28 - RNA, 21 nt, synthetic construct
  misc_feature 1..21: note = Ps3122sense
  source 1..21: mol_type = other RNA
attcgcacccctacttcacag

SEQ ID NO: 29 - RNA, 21 nt, synthetic construct
  misc_feature 1..21: note = Ps3124sense
  source 1..21: mol_type = other RNA
tcgcacccctacttcacagag

SEQ ID NO: 30 - RNA, 21 nt, synthetic construct
  misc_feature 1..21: note = Ps3129sense
  source 1..21: mol_type = other RNA
cccctacttcacagaggaaga

SEQ ID NO: 31 - RNA, 21 nt, synthetic construct
  misc_feature 1..21: note = Ps3140sense
  source 1..21: mol_type = other RNA
cagaggaagaaacctggaacc

SEQ ID NO: 32 - RNA, 21 nt, synthetic construct
  misc_feature 1..21: note = Ps3196sense
  source 1..21: mol_type = other RNA
actgagccagaaacgcagatt

SEQ ID NO: 33 - RNA, 21 nt, synthetic construct
  misc_feature 1..21: note = Ps3198sense
  source 1..21: mol_type = other RNA
tgagccagaaacgcagattgg

SEQ ID NO: 34 - RNA, 21 nt, synthetic construct
  misc_feature 1..21: note = Ps3233sense
  source 1..21: mol_type = other RNA
caagcctcttcttacttcacc

SEQ ID NO: 35 - RNA, 21 nt, synthetic construct
  misc_feature 1..21: note = Ps3316sense
  source 1..21: mol_type = other RNA
gctcggtgagtgatggcagaa

SEQ ID NO: 36 - RNA, 21 nt, synthetic construct
  misc_feature 1..21: note = Ps3320sense
  source 1..21: mol_type = other RNA
ggtgagtgatggcagaacgat

SEQ ID NO: 37 - RNA, 21 nt, synthetic construct
  misc_feature 1..21: note = Ps3464sense
  source 1..21: mol_type = other RNA
cccaagcaagcagacatttat

SEQ ID NO: 38 - RNA, 21 nt, synthetic construct
  misc_feature 1..21: note = Ps3466sense
  source 1..21: mol_type = other RNA
caagcaagcagacatttatct

SEQ ID NO: 39 - RNA, 21 nt, synthetic construct
  misc_feature 1..21: note = Ps3489sense
  source 1..21: mol_type = other RNA
tgggtctgtcctctctgttgc

SEQ ID NO: 40 - RNA, 21 nt, synthetic construct
  misc_feature 1..21: note = Ps3543sense
  source 1..21: mol_type = other RNA
cttttgtaacttgaagatatt

SEQ ID NO: 41 - RNA, 21 nt, synthetic construct
  misc_feature 1..21: note = Ps3548sense
  source 1..21: mol_type = other RNA
gtaacttgaagatatttattc

SEQ ID NO: 42 - RNA, 21 nt, synthetic construct
  misc_feature 1..21: note = Ps3554sense
  source 1..21: mol_type = other RNA
tgaagatatttattctgggtt

SEQ ID NO: 43 - RNA, 21 nt, synthetic construct
  misc_feature 1..21: note = P446sense
  source 1..21: mol_type = other RNA
ccgaagcacccgagcacggaa

SEQ ID NO: 44 - RNA, 21 nt, synthetic construct
  misc_feature 1..21: note = P516sense
  source 1..21: mol_type = other RNA
cacctacgtggtggtgctgaa

SEQ ID NO: 45 - RNA, 21 nt, synthetic construct
  misc_feature 1..21: note = P607sense
  source 1..21: mol_type = other RNA
tacctcaccaagatcctgcat

SEQ ID NO: 46 - RNA, 21 nt, synthetic construct
  misc_feature 1..21: note = P612sense
  source 1..21: mol_type = other RNA
caccaagatcctgcatgtctt

SEQ ID NO: 47 - RNA, 21 nt, synthetic construct
  misc_feature 1..21: note = P629sense
  source 1..21: mol_type = other RNA
tcttccatggccttcttcctg

SEQ ID NO: 48 - RNA, 21 nt, synthetic construct
  misc_feature 1..21: note = P633sense
  source 1..21: mol_type = other RNA
ccatggccttcttcctggctt

SEQ ID NO: 49 - RNA, 21 nt, synthetic construct
  misc_feature 1..21: note = P693sense
  source 1..21: mol_type = other RNA
gaagttgccccatgtcgacta

SEQ ID NO: 50 - RNA, 21 nt, synthetic construct
  misc_feature 1..21: note = P823sense
  source 1..21: mol_type = other RNA
ctggtggaggtgtatctccta

SEQ ID NO: 51 - RNA, 21 nt, synthetic construct
  misc_feature 1..21: note = P835sense
  source 1..21: mol_type = other RNA
tatctcctagacaccagcata

SEQ ID NO: 52 - RNA, 21 nt, synthetic construct
  misc_feature 1..21: note = P839sense
  source 1..21: mol_type = other RNA
tcctagacaccagcatacaga

SEQ ID NO: 53 - RNA, 21 nt, synthetic construct
  misc_feature 1..21: note = P842sense
  source 1..21: mol_type = other RNA
tagacaccagcatacagagtg

SEQ ID NO: 54 - RNA, 21 nt, synthetic construct
  misc_feature 1..21: note = P845sense
  source 1..21: mol_type = other RNA
acaccagcatacagagtgacc

SEQ ID NO: 55 - RNA, 21 nt, synthetic construct
  misc_feature 1..21: note = P854sense
  source 1..21: mol_type = other RNA
tacagagtgaccaccgggaaa

SEQ ID NO: 56 - RNA, 21 nt, synthetic construct
  misc_feature 1..21: note = P882sense
  source 1..21: mol_type = other RNA
cagggtcatggtcaccgactt

SEQ ID NO: 57 - RNA, 21 nt, synthetic construct
  misc_feature 1..21: note = P888sense
  source 1..21: mol_type = other RNA
catggtcaccgacttcgagaa

SEQ ID NO: 58 - RNA, 21 nt, synthetic construct
  misc_feature 1..21: note = P891sense
  source 1..21: mol_type = other RNA
ggtcaccgacttcgagaatgt

SEQ ID NO: 59 - RNA, 21 nt, synthetic construct
  misc_feature 1..21: note = P1066sense
  source 1..21: mol_type = other RNA
acggttagcggcaccctcata

SEQ ID NO: 60 - RNA, 21 nt, synthetic construct
  misc_feature 1..21: note = P1079sense
  source 1..21: mol_type = other RNA
ccctcataggcctggagttta

SEQ ID NO: 61 - RNA, 21 nt, synthetic construct
  misc_feature 1..21: note = P1081sense
  source 1..21: mol_type = other RNA
ctcataggcctggagtttatt

SEQ ID NO: 62 - RNA, 21 nt, synthetic construct
  misc_feature 1..21: note = P1085sense
  source 1..21: mol_type = other RNA
taggcctggagtttattcgga

SEQ ID NO: 63 - RNA, 21 nt, synthetic construct
  misc_feature 1..21: note = P1161sense
  source 1..21: mol_type = other RNA
tgggtacagccgcgtcctcaa

SEQ ID NO: 64 - RNA, 21 nt, synthetic construct
  misc_feature 1..21: note = P1242sense
  source 1..21: mol_type = other RNA
ccgggacgatgcctgcctcta

SEQ ID NO: 65 - RNA, 21 nt, synthetic construct
  misc_feature 1..21: note = P1413sense
  source 1..21: mol_type = other RNA
cagcacctgctttgtgtcaca

SEQ ID NO: 66 - RNA, 21 nt, synthetic construct
  misc_feature 1..21: note = P1514sense
  source 1..21: mol_type = other RNA
ccgagttgaggcagagactga

SEQ ID NO: 67 - RNA, 21 nt, synthetic construct
  misc_feature 1..21: note = P1518sense
  source 1..21: mol_type = other RNA
gttgaggcagagactgatcca

SEQ ID NO: 68 - RNA, 21 nt, synthetic construct
  misc_feature 1..21: note = P1521sense
  source 1..21: mol_type = other RNA
gaggcagagactgatccactt

SEQ ID NO: 69 - RNA, 21 nt, synthetic construct
  misc_feature 1..21: note = P1523sense
  source 1..21: mol_type = other RNA
ggcagagactgatccacttct

SEQ ID NO: 70 - RNA, 21 nt, synthetic construct
  misc_feature 1..21: note = P1531sense
  source 1..21: mol_type = other RNA
ctgatccacttctctgccaaa

SEQ ID NO: 71 - RNA, 21 nt, synthetic construct
  misc_feature 1..21: note = P1533sense
  source 1..21: mol_type = other RNA
gatccacttctctgccaaaga

SEQ ID NO: 72 - RNA, 21 nt, synthetic construct
  misc_feature 1..21: note = P1536sense
  source 1..21: mol_type = other RNA
ccacttctctgccaaagatgt

SEQ ID NO: 73 - RNA, 21 nt, synthetic construct
  misc_feature 1..21: note = P1539sense
  source 1..21: mol_type = other RNA
cttctctgccaaagatgtcat

SEQ ID NO: 74 - RNA, 21 nt, synthetic construct
  misc_feature 1..21: note = P1547sense
  source 1..21: mol_type = other RNA
ccaaagatgtcatcaatgagg

SEQ ID NO: 75 - RNA, 21 nt, synthetic construct
  misc_feature 1..21: note = P1659sense
  source 1..21: mol_type = other RNA
caggactgtatggtcagcaca

SEQ ID NO: 76 - RNA, 21 nt, synthetic construct
  misc_feature 1..21: note = P1661sense
  source 1..21: mol_type = other RNA
ggactgtatggtcagcacact

SEQ ID NO: 77 - RNA, 21 nt, synthetic construct
  misc_feature 1..21: note = P2101sense
  source 1..21: mol_type = other RNA
ggtctggaatgcaaagtcaag

SEQ ID NO: 78 - RNA, 21 nt, synthetic construct
  misc_feature 1..21: note = P2112sense
  source 1..21: mol_type = other RNA
caaagtcaaggagcatggaat

SEQ ID NO: 79 - RNA, 21 nt, synthetic construct
  misc_feature 1..21: note = P2114sense
  source 1..21: mol_type = other RNA
aagtcaaggagcatggaatcc

SEQ ID NO: 80 - RNA, 21 nt, synthetic construct
  misc_feature 1..21: note = P2116sense
  source 1..21: mol_type = other RNA
gtcaaggagcatggaatcccg

SEQ ID NO: 81 - RNA, 21 nt, synthetic construct
  misc_feature 1..21: note = SP71sense
  source 1..21: mol_type = other RNA
acacattcgcacccctacttc

SEQ ID NO: 82 - RNA, 21 nt, synthetic construct
  misc_feature 1..21: note = SP73sense
  source 1..21: mol_type = other RNA
acattcgcacccctacttcac

SEQ ID NO: 83 - RNA, 21 nt, synthetic construct
  misc_feature 1..21: note = SP74sense
  source 1..21: mol_type = other RNA
cattcgcacccctacttcaca

SEQ ID NO: 84 - RNA, 21 nt, synthetic construct
  misc_feature 1..21: note = SP76sense
  source 1..21: mol_type = other RNA
ttcgcacccctacttcacaga

SEQ ID NO: 85 - RNA, 21 nt, synthetic construct
  misc_feature 1..21: note = SP107sense
  source 1..21: mol_type = other RNA
aactgagccagaaacgcagat

SEQ ID NO: 86 - RNA, 21 nt, synthetic construct
  misc_feature 1..21: note = SP109sense
  source 1..21: mol_type = other RNA
ctgagccagaaacgcagattg

SEQ ID NO: 87 - RNA, 21 nt, synthetic construct
  misc_feature 1..21: note = SP133sense
  source 1..21: mol_type = other RNA
gccaagcctcttcttacttca

SEQ ID NO: 88 - RNA, 21 nt, synthetic construct
  misc_feature 1..21: note = SP134sense
  source 1..21: mol_type = other RNA
ccaagcctcttcttacttcac

SEQ ID NO: 89 - RNA, 21 nt, synthetic construct
  misc_feature 1..21: note = SP227sense
  source 1..21: mol_type = other RNA
ctttttccgttatcacccagg

SEQ ID NO: 90 - RNA, 21 nt, synthetic construct
  misc_feature 1..21: note = SP300sense
  source 1..21: mol_type = other RNA
cacccaagcaagcagacattt

SEQ ID NO: 91 - RNA, 21 nt, synthetic construct
  misc_feature 1..21: note = SP301sense
  source 1..21: mol_type = other RNA
acccaagcaagcagacattta

SEQ ID NO: 92 - RNA, 21 nt, synthetic construct
  misc_feature 1..21: note = SP304sense
  source 1..21: mol_type = other RNA
aagcaagcagacatttatctt

SEQ ID NO: 93 - RNA, 21 nt, synthetic construct
  misc_feature 1..21: note = SP305sense
  source 1..21: mol_type = other RNA
aagcagacatttatcttttgg

SEQ ID NO: 94 - RNA, 21 nt, synthetic construct
  misc_feature 1..21: note = SP306sense
  source 1..21: mol_type = other RNA
agcagacatttatcttttggg

SEQ ID NO: 95 - RNA, 21 nt, synthetic construct
  misc_feature 1..21: note = SP326sense
  source 1..21: mol_type = other RNA
tgtcctctctgttgccttttt

SEQ ID NO: 96 - RNA, 21 nt, synthetic construct
  misc_feature 1..21: note = SP327sense
  source 1..21: mol_type = other RNA
tcctctctgttgcctttttac

SEQ ID NO: 97 - RNA, 21 nt, synthetic construct
  misc_feature 1..21: note = SP332sense
  source 1..21: mol_type = other RNA
gcctttttacagccaactttt

SEQ ID NO: 98 - RNA, 21 nt, synthetic construct
  misc_feature 1..21: note = SP334sense
  source 1..21: mol_type = other RNA
tttacagccaacttttctaga

SEQ ID NO: 99 - RNA, 21 nt, synthetic construct
  misc_feature 1..21: note = SP340sense
  source 1..21: mol_type = other RNA
gccaacttttctagacctgtt

SEQ ID NO: 100 - RNA, 21 nt, synthetic construct
  misc_feature 1..21: note = SP341sense
  source 1..21: mol_type = other RNA
ccaacttttctagacctgttt

SEQ ID NO: 101 - RNA, 21 nt, synthetic construct
  misc_feature 1..21: note = SP342sense
  source 1..21: mol_type = other RNA
caacttttctagacctgtttt

SEQ ID NO: 102 - RNA, 21 nt, synthetic construct
  misc_feature 1..21: note = SP343sense
  source 1..21: mol_type = other RNA
aacttttctagacctgttttg

SEQ ID NO: 103 - RNA, 21 nt, synthetic construct
  misc_feature 1..21: note = SP344sense
  source 1..21: mol_type = other RNA
acttttctagacctgttttgc

SEQ ID NO: 104 - RNA, 21 nt, synthetic construct
  misc_feature 1..21: note = SP345sense
  source 1..21: mol_type = other RNA
cttttctagacctgttttgct

SEQ ID NO: 105 - RNA, 21 nt, synthetic construct
  misc_feature 1..21: note = SP348sense
  source 1..21: mol_type = other RNA
ttctagacctgttttgctttt

SEQ ID NO: 106 - RNA, 21 nt, synthetic construct
  misc_feature 1..21: note = SP349sense
  source 1..21: mol_type = other RNA
tctagacctgttttgcttttg

SEQ ID NO: 107 - RNA, 21 nt, synthetic construct
  misc_feature 1..21: note = SP351sense
  source 1..21: mol_type = other RNA
agacctgttttgcttttgtaa

SEQ ID NO: 108 - RNA, 21 nt, synthetic construct
  misc_feature 1..21: note = SP357sense
  source 1..21: mol_type = other RNA
atttattctgggttttgtagc

SEQ ID NO: 109 - RNA, 21 nt, synthetic construct
  misc_feature 1..21: note = Pt608sense
  source 1..21: mol_type = other RNA
acctcaccaagatcctgcatg

SEQ ID NO: 110 - RNA, 21 nt, synthetic construct
  misc_feature 1..21: note = Pt609sense
  source 1..21: mol_type = other RNA
cctcaccaagatcctgcatgt

SEQ ID NO: 111 - RNA, 21 nt, synthetic construct
  misc_feature 1..21: note = Pt692sense
  source 1..21: mol_type = other RNA
tgaagttgccccatgtcgact

SEQ ID NO: 112 - RNA, 21 nt, synthetic construct
  misc_feature 1..21: note = Pt694sense
  source 1..21: mol_type = other RNA
aagttgccccatgtcgactac

SEQ ID NO: 113 - RNA, 21 nt, synthetic construct
  misc_feature 1..21: note = Pt695sense
  source 1..21: mol_type = other RNA
agttgccccatgtcgactaca

SEQ ID NO: 114 - RNA, 21 nt, synthetic construct
  misc_feature 1..21: note = Pt837sense
  source 1..21: mol_type = other RNA
tctcctagacaccagcataca

SEQ ID NO: 115 - RNA, 21 nt, synthetic construct
  misc_feature 1..21: note = Pt838sense
  source 1..21: mol_type = other RNA
ctcctagacaccagcatacag

SEQ ID NO: 116 - RNA, 21 nt, synthetic construct
  misc_feature 1..21: note = Pt840sense
  source 1..21: mol_type = other RNA
cctagacaccagcatacagag

SEQ ID NO: 117 - RNA, 21 nt, synthetic construct
  misc_feature 1..21: note = Pt841sense
  source 1..21: mol_type = other RNA
ctagacaccagcatacagagt

SEQ ID NO: 118 - RNA, 21 nt, synthetic construct
  misc_feature 1..21: note = Pt844sense
  source 1..21: mol_type = other RNA
gacaccagcatacagagtgac

SEQ ID NO: 119 - RNA, 21 nt, synthetic construct
  misc_feature 1..21: note = Pt847sense
  source 1..21: mol_type = other RNA
accagcatacagagtgaccac

SEQ ID NO: 120 - RNA, 21 nt, synthetic construct
  misc_feature 1..21: note = Pt848sense
  source 1..21: mol_type = other RNA
ccagcatacagagtgaccacc

SEQ ID NO: 121 - RNA, 21 nt, synthetic construct
  misc_feature 1..21: note = Pt855sense
  source 1..21: mol_type = other RNA
acagagtgaccaccgggaaat

SEQ ID NO: 122 - RNA, 21 nt, synthetic construct
  misc_feature 1..21: note = Pt856sense
  source 1..21: mol_type = other RNA
cagagtgaccaccgggaaatc

SEQ ID NO: 123 - RNA, 21 nt, synthetic construct
  misc_feature 1..21: note = Pt889sense
  source 1..21: mol_type = other RNA
atggtcaccgacttcgagaat

SEQ ID NO: 124 - RNA, 21 nt, synthetic construct
  misc_feature 1..21: note = Pt890sense
  source 1..21: mol_type = other RNA
tggtcaccgacttcgagaatg

SEQ ID NO: 125 - RNA, 21 nt, synthetic construct
  misc_feature 1..21: note = Pt892sense
  source 1..21: mol_type = other RNA
gtcaccgacttcgagaatgtg

SEQ ID NO: 126 - RNA, 21 nt, synthetic construct
  misc_feature 1..21: note = Pt941sense
  source 1..21: mol_type = other RNA
gacaggccagcaagtgtgaca

SEQ ID NO: 127 - RNA, 21 nt, synthetic construct
  misc_feature 1..21: note = Pt1080sense
  source 1..21: mol_type = other RNA
cctcataggcctggagtttat

SEQ ID NO: 128 - RNA, 21 nt, synthetic construct
  misc_feature 1..21: note = Pt1082sense
  source 1..21: mol_type = other RNA
tcataggcctggagtttattc

SEQ ID NO: 129 - RNA, 21 nt, synthetic construct
  misc_feature 1..21: note = Pt1083sense
  source 1..21: mol_type = other RNA
cataggcctggagtttattcg

SEQ ID NO: 130 - RNA, 21 nt, synthetic construct
  misc_feature 1..21: note = Pt1084sense
  source 1..21: mol_type = other RNA
ataggcctggagtttattcgg

SEQ ID NO: 131 - RNA, 21 nt, synthetic construct
  misc_feature 1..21: note = Pt1086sense
  source 1..21: mol_type = other RNA
aggcctggagtttattcggaa

SEQ ID NO: 132 - RNA, 21 nt, synthetic construct
  misc_feature 1..21: note = Pt1087sense
  source 1..21: mol_type = other RNA
ggcctggagtttattcggaaa

SEQ ID NO: 133 - RNA, 21 nt, synthetic construct
  misc_feature 1..21: note = Pt1275sense
  source 1..21: mol_type = other RNA
agctcccgaggtcatcacagt

SEQ ID NO: 134 - RNA, 21 nt, synthetic construct
  misc_feature 1..21: note = Pt1516sense
  source 1..21: mol_type = other RNA
gagttgaggcagagactgatc

SEQ ID NO: 135 - RNA, 21 nt, synthetic construct
  misc_feature 1..21: note = Pt1517sense
  source 1..21: mol_type = other RNA
agttgaggcagagactgatcc

SEQ ID NO: 136 - RNA, 21 nt, synthetic construct
  misc_feature 1..21: note = Pt1519sense
  source 1..21: mol_type = other RNA
ttgaggcagagactgatccac

SEQ ID NO: 137 - RNA, 21 nt, synthetic construct
  misc_feature 1..21: note = Pt1520sense
  source 1..21: mol_type = other RNA
tgaggcagagactgatccact

SEQ ID NO: 138 - RNA, 21 nt, synthetic construct
  misc_feature 1..21: note = Pt1522sense
  source 1..21: mol_type = other RNA
aggcagagactgatccacttc

SEQ ID NO: 139 - RNA, 21 nt, synthetic construct
  misc_feature 1..21: note = Pt1530sense
  source 1..21: mol_type = other RNA
actgatccacttctctgccaa

SEQ ID NO: 140 - RNA, 21 nt, synthetic construct
  misc_feature 1..21: note = Pt1532sense
  source 1..21: mol_type = other RNA
tgatccacttctctgccaaag

SEQ ID NO: 141 - RNA, 21 nt, synthetic construct
  misc_feature 1..21: note = Pt1534sense
  source 1..21: mol_type = other RNA
atccacttctctgccaaagat

SEQ ID NO: 142 - RNA, 21 nt, synthetic construct
  misc_feature 1..21: note = Pt1535sense
  source 1..21: mol_type = other RNA
tccacttctctgccaaagatg

SEQ ID NO: 143 - RNA, 21 nt, synthetic construct
  misc_feature 1..21: note = Pt1537sense
  source 1..21: mol_type = other RNA
cacttctctgccaaagatgtc

SEQ ID NO: 144 - RNA, 21 nt, synthetic construct
  misc_feature 1..21: note = Pt1538sense
  source 1..21: mol_type = other RNA
acttctctgccaaagatgtca

SEQ ID NO: 145 - RNA, 21 nt, synthetic construct
  misc_feature 1..21: note = Pt2102sense
  source 1..21: mol_type = other RNA
gtctggaatgcaaagtcaagg

SEQ ID NO: 146 - RNA, 21 nt, synthetic construct
  misc_feature 1..21: note = Pt2105sense
  source 1..21: mol_type = other RNA
tggaatgcaaagtcaaggagc

SEQ ID NO: 147 - RNA, 21 nt, synthetic construct
  misc_feature 1..21: note = Pt2106sense
  source 1..21: mol_type = other RNA
ggaatgcaaagtcaaggagca

SEQ ID NO: 148 - RNA, 21 nt, synthetic construct
  misc_feature 1..21: note = Pt2113sense
  source 1..21: mol_type = other RNA
aaagtcaaggagcatggaatc

SEQ ID NO: 149 - RNA, 21 nt, synthetic construct
  misc_feature 1..21: note = Pt2115sense
  source 1..21: mol_type = other RNA
agtcaaggagcatggaatccc

SEQ ID NO: 150 - RNA, 21 nt, synthetic construct
  misc_feature 1..21: note = Pt2426sense
  source 1..21: mol_type = other RNA
atggttccgacttgtccctct

SEQ ID NO: 151 - RNA, 21 nt, synthetic construct
  misc_feature 1..21: note = Pt2427sense
  source 1..21: mol_type = other RNA
tggttccgacttgtccctctc

SEQ ID NO: 152 - RNA, 21 nt, synthetic construct
  misc_feature 1..21: note = Pt2432sense
  source 1..21: mol_type = other RNA
ccgacttgtccctctctcagc

SEQ ID NO: 153 - RNA, 21 nt, synthetic construct
  misc_feature 1..21: note = Pt2530sense
  source 1..21: mol_type = other RNA
cctccttgcctggaactcact

SEQ ID NO: 154 - RNA, 21 nt, synthetic construct
  misc_feature 1..21: note = Pt2532sense
  source 1..21: mol_type = other RNA
tccttgcctggaactcactca

SEQ ID NO: 155 - RNA, 21 nt, synthetic construct
  misc_feature 1..21: note = Pt2533sense
  source 1..21: mol_type = other RNA
ccttgcctggaactcactcac

SEQ ID NO: 156 - RNA, 21 nt, synthetic construct
  misc_feature 1..21: note = Pt2534sense
  source 1..21: mol_type = other RNA
cttgcctggaactcactcact

SEQ ID NO: 157 - RNA, 21 nt, synthetic construct
  misc_feature 1..21: note = Pt2535sense
  source 1..21: mol_type = other RNA
ttgcctggaactcactcactc

SEQ ID NO: 158 - RNA, 21 nt, synthetic construct
  misc_feature 1..21: note = Pt2536sense
  source 1..21: mol_type = other RNA
tgcctggaactcactcactct

SEQ ID NO: 159 - RNA, 21 nt, synthetic construct
  misc_feature 1..21: note = Pt2538sense
  source 1..21: mol_type = other RNA
cctggaactcactcactctgg

SEQ ID NO: 160 - RNA, 21 nt, synthetic construct
  misc_feature 1..21: note = Pt2540sense
  source 1..21: mol_type = other RNA
tggaactcactcactctgggt

SEQ ID NO: 161 - RNA, 21 nt, synthetic construct
  misc_feature 1..21: note = Pt2541sense
  source 1..21: mol_type = other RNA
ggaactcactcactctgggtg

SEQ ID NO: 162 - RNA, 21 nt, synthetic construct
  misc_feature 1..21: note = Pt2542sense
  source 1..21: mol_type = other RNA
gaactcactcactctgggtgc

SEQ ID NO: 163 - RNA, 21 nt, synthetic construct
  misc_feature 1..21: note = Pt2544sense
  source 1..21: mol_type = other RNA
actcactcactctgggtgcct

SEQ ID NO: 164 - RNA, 21 nt, synthetic construct
  misc_feature 1..21: note = Pt2545sense
  source 1..21: mol_type = other RNA
ctcactcactctgggtgcctc

SEQ ID NO: 165 - RNA, 21 nt, synthetic construct
  misc_feature 1..21: note = Pt2611sense
  source 1..21: mol_type = other RNA
catttcaccattcaaacaggt

SEQ ID NO: 166 - RNA, 21 nt, synthetic construct
  misc_feature 1..21: note = Pt2612sense
  source 1..21: mol_type = other RNA
atttcaccattcaaacaggtc

SEQ ID NO: 167 - RNA, 21 nt, synthetic construct
  misc_feature 1..21: note = Pt2613sense
  source 1..21: mol_type = other RNA
tttcaccattcaaacaggtcg

SEQ ID NO: 168 - RNA, 21 nt, synthetic construct
  misc_feature 1..21: note = Pt2614sense
  source 1..21: mol_type = other RNA
ttcaccattcaaacaggtcga

SEQ ID NO: 169 - RNA, 21 nt, synthetic construct
  misc_feature 1..21: note = Pt2615sense
  source 1..21: mol_type = other RNA
tcaccattcaaacaggtcgag

SEQ ID NO: 170 - RNA, 21 nt, synthetic construct
  misc_feature 1..21: note = Pt2616sense
  source 1..21: mol_type = other RNA
caccattcaaacaggtcgagc

SEQ ID NO: 171 - RNA, 21 nt, synthetic construct
  misc_feature 1..21: note = Pt2618sense
  source 1..21: mol_type = other RNA
ccattcaaacaggtcgagctg

SEQ ID NO: 172 - RNA, 21 nt, synthetic construct
  misc_feature 1..21: note = Pt2656sense
  source 1..21: mol_type = other RNA
ctgctcccaatgtgccgatgt

SEQ ID NO: 173 - RNA, 21 nt, synthetic construct
  misc_feature 1..21: note = Pt2673sense
  source 1..21: mol_type = other RNA
atgtccgtgggcagaatgact

SEQ ID NO: 174 - RNA, 21 nt, synthetic construct
  misc_feature 1..21: note = Pt2675sense
  source 1..21: mol_type = other RNA
gtccgtgggcagaatgacttt

SEQ ID NO: 175 - RNA, 21 nt, synthetic construct
  misc_feature 1..21: note = Pt2696sense
  source 1..21: mol_type = other RNA
tattgagctcttgttccgtgc

SEQ ID NO: 176 - RNA, 21 nt, synthetic construct
  misc_feature 1..21: note = Pt2697sense
  source 1..21: mol_type = other RNA
attgagctcttgttccgtgcc

SEQ ID NO: 177 - RNA, 21 nt, synthetic construct
  misc_feature 1..21: note = Pt2698sense
  source 1..21: mol_type = other RNA
ttgagctcttgttccgtgcca

SEQ ID NO: 178 - RNA, 21 nt, synthetic construct
  misc_feature 1..21: note = Pt2699sense
  source 1..21: mol_type = other RNA
tgagctcttgttccgtgccag

SEQ ID NO: 179 - RNA, 21 nt, synthetic construct
  misc_feature 1..21: note = Pt2700sense
  source 1..21: mol_type = other RNA
gagctcttgttccgtgccagg

SEQ ID NO: 180 - RNA, 21 nt, synthetic construct
  misc_feature 1..21: note = Pt2717sense
  source 1..21: mol_type = other RNA
caggcattcaatcctcaggtc

SEQ ID NO: 181 - RNA, 21 nt, synthetic construct
  misc_feature 1..21: note = Pt2718sense
  source 1..21: mol_type = other RNA
aggcattcaatcctcaggtct

SEQ ID NO: 182 - RNA, 21 nt, synthetic construct
  misc_feature 1..21: note = Pt2720sense
  source 1..21: mol_type = other RNA
gcattcaatcctcaggtctcc

SEQ ID NO: 183 - RNA, 21 nt, synthetic construct
  misc_feature 1..21: note = Pt2722sense
  source 1..21: mol_type = other RNA
attcaatcctcaggtctccac

SEQ ID NO: 184 - RNA, 21 nt, synthetic construct
  misc_feature 1..21: note = Pt2724sense
  source 1..21: mol_type = other RNA
tcaatcctcaggtctccacca

SEQ ID NO: 185 - RNA, 21 nt, synthetic construct
  misc_feature 1..21: note = Pt2726sense
  source 1..21: mol_type = other RNA
aatcctcaggtctccaccaag

SEQ ID NO: 186 - RNA, 21 nt, synthetic construct
  misc_feature 1..21: note = Pt2727sense
  source 1..21: mol_type = other RNA
atcctcaggtctccaccaagg

SEQ ID NO: 187 - RNA, 21 nt, synthetic construct
  misc_feature 1..21: note = Pt2741sense
  source 1..21: mol_type = other RNA
accaaggaggcaggattcttc

SEQ ID NO: 188 - RNA, 21 nt, synthetic construct
  misc_feature 1..21: note = Pt2742sense
  source 1..21: mol_type = other RNA
ccaaggaggcaggattcttcc

SEQ ID NO: 189 - RNA, 21 nt, synthetic construct
  misc_feature 1..21: note = Pt2743sense
  source 1..21: mol_type = other RNA
caaggaggcaggattcttccc

SEQ ID NO: 190 - RNA, 21 nt, synthetic construct
  misc_feature 1..21: note = Pt2744sense
  source 1..21: mol_type = other RNA
aaggaggcaggattcttccca

SEQ ID NO: 191 - RNA, 21 nt, synthetic construct
  misc_feature 1..21: note = Pt2745sense
  source 1..21: mol_type = other RNA
aggaggcaggattcttcccat

SEQ ID NO: 192 - RNA, 21 nt, synthetic construct
  misc_feature 1..21: note = Pt2746sense
  source 1..21: mol_type = other RNA
ggaggcaggattcttcccatg

SEQ ID NO: 193 - RNA, 21 nt, synthetic construct
  misc_feature 1..21: note = Pt2747sense
  source 1..21: mol_type = other RNA
gaggcaggattcttcccatgg

SEQ ID NO: 194 - RNA, 21 nt, synthetic construct
  misc_feature 1..21: note = Pt2748sense
  source 1..21: mol_type = other RNA
aggcaggattcttcccatgga

SEQ ID NO: 195 - RNA, 21 nt, synthetic construct
  misc_feature 1..21: note = Pt2750sense
  source 1..21: mol_type = other RNA
gcaggattcttcccatggata

SEQ ID NO: 196 - RNA, 21 nt, synthetic construct
  misc_feature 1..21: note = Pt2752sense
  source 1..21: mol_type = other RNA
aggattcttcccatggatagg

SEQ ID NO: 197 - RNA, 21 nt, synthetic construct
  misc_feature 1..21: note = Pt2753sense
  source 1..21: mol_type = other RNA
ggattcttcccatggataggg

SEQ ID NO: 198 - RNA, 21 nt, synthetic construct
  misc_feature 1..21: note = Pt2789sense
  source 1..21: mol_type = other RNA
gctgcagggacaaacatcgtt

SEQ ID NO: 199 - RNA, 21 nt, synthetic construct
  misc_feature 1..21: note = Pt2790sense
  source 1..21: mol_type = other RNA
ctgcagggacaaacatcgttg

SEQ ID NO: 200 - RNA, 21 nt, synthetic construct
  misc_feature 1..21: note = Pt2791sense
  source 1..21: mol_type = other RNA
tgcagggacaaacatcgttgg

SEQ ID NO: 201 - RNA, 21 nt, synthetic construct
  misc_feature 1..21: note = Pt2792sense
  source 1..21: mol_type = other RNA
gcagggacaaacatcgttggg

SEQ ID NO: 202 - RNA, 21 nt, synthetic construct
  misc_feature 1..21: note = Pt2815sense
  source 1..21: mol_type = other RNA
gtgagtgtgaaaggtgctgat

SEQ ID NO: 203 - RNA, 21 nt, synthetic construct
  misc_feature 1..21: note = Pt2816sense
  source 1..21: mol_type = other RNA
tgagtgtgaaaggtgctgatg

SEQ ID NO: 204 - RNA, 21 nt, synthetic construct
  misc_feature 1..21: note = Pt2818sense
  source 1..21: mol_type = other RNA
agtgtgaaaggtgctgatggc

SEQ ID NO: 205 - RNA, 21 nt, synthetic construct
  misc_feature 1..21: note = Pt2819sense
  source 1..21: mol_type = other RNA
gtgtgaaaggtgctgatggcc

SEQ ID NO: 206 - RNA, 21 nt, synthetic construct
  misc_feature 1..21: note = Pt2820sense
  source 1..21: mol_type = other RNA
tgtgaaaggtgctgatggccc

SEQ ID NO: 207 - RNA, 21 nt, synthetic construct
  misc_feature 1..21: note = Pt2821sense
  source 1..21: mol_type = other RNA
gtgaaaggtgctgatggccct

SEQ ID NO: 208 - RNA, 21 nt, synthetic construct
  misc_feature 1..21: note = Pt2822sense
  source 1..21: mol_type = other RNA
tgaaaggtgctgatggccctc

SEQ ID NO: 209 - RNA, 21 nt, synthetic construct
  misc_feature 1..21: note = Pt2823sense
  source 1..21: mol_type = other RNA
gaaaggtgctgatggccctca

SEQ ID NO: 210 - RNA, 21 nt, synthetic construct
  misc_feature 1..21: note = Pt2837sense
  source 1..21: mol_type = other RNA
gccctcatctccagctaactg

SEQ ID NO: 211 - RNA, 21 nt, synthetic construct
  misc_feature 1..21: note = Pt2838sense
  source 1..21: mol_type = other RNA
ccctcatctccagctaactgt

SEQ ID NO: 212 - RNA, 21 nt, synthetic construct
  misc_feature 1..21: note = Pt2839sense
  source 1..21: mol_type = other RNA
cctcatctccagctaactgtg

SEQ ID NO: 213 - RNA, 21 nt, synthetic construct
  misc_feature 1..21: note = Pt2840sense
  source 1..21: mol_type = other RNA
ctcatctccagctaactgtgg

SEQ ID NO: 214 - RNA, 21 nt, synthetic construct
  misc_feature 1..21: note = Pt2850sense
  source 1..21: mol_type = other RNA
gctaactgtggagaagcccct

SEQ ID NO: 215 - RNA, 21 nt, synthetic construct
  misc_feature 1..21: note = Pt2851sense
  source 1..21: mol_type = other RNA
ctaactgtggagaagcccctg

SEQ ID NO: 216 - RNA, 21 nt, synthetic construct
  misc_feature 1..21: note = Pt2879sense
  source 1..21: mol_type = other RNA
cctgattaatggaggcttagc

SEQ ID NO: 217 - RNA, 21 nt, synthetic construct
  misc_feature 1..21: note = Pt2881sense
  source 1..21: mol_type = other RNA
tgattaatggaggcttagctt

SEQ ID NO: 218 - RNA, 21 nt, synthetic construct
  misc_feature 1..21: note = Pt2882sense
  source 1..21: mol_type = other RNA
gattaatggaggcttagcttt

SEQ ID NO: 219 - RNA, 21 nt, synthetic construct
  misc_feature 1..21: note = Pt2883sense
  source 1..21: mol_type = other RNA
attaatggaggcttagctttc

SEQ ID NO: 220 - RNA, 21 nt, synthetic construct
  misc_feature 1..21: note = Pt2885sense
  source 1..21: mol_type = other RNA
taatggaggcttagctttctg

SEQ ID NO: 221 - RNA, 21 nt, synthetic construct
  misc_feature 1..21: note = Pt2886sense
  source 1..21: mol_type = other RNA
aatggaggcttagctttctgg

SEQ ID NO: 222 - RNA, 21 nt, synthetic construct
  misc_feature 1..21: note = Pt2887sense
  source 1..21: mol_type = other RNA
atggaggcttagctttctgga

SEQ ID NO: 223 - RNA, 21 nt, synthetic construct
  misc_feature 1..21: note = Pt2888sense
  source 1..21: mol_type = other RNA
tggaggcttagctttctggat

SEQ ID NO: 224 - RNA, 21 nt, synthetic construct
  misc_feature 1..21: note = Pt2889sense
  source 1..21: mol_type = other RNA
ggaggcttagctttctggatg

SEQ ID NO: 225 - RNA, 21 nt, synthetic construct
  misc_feature 1..21: note = Pt2890sense
  source 1..21: mol_type = other RNA
gaggcttagctttctggatgg

SEQ ID NO: 226 - RNA, 21 nt, synthetic construct
  misc_feature 1..21: note = Pt2891sense
  source 1..21: mol_type = other RNA
aggcttagctttctggatggc

SEQ ID NO: 227 - RNA, 21 nt, synthetic construct
  misc_feature 1..21: note = Pt2893sense
  source 1..21: mol_type = other RNA
gcttagctttctggatggcat

SEQ ID NO: 228 - RNA, 21 nt, synthetic construct
  misc_feature 1..21: note = Pt2959sense
  source 1..21: mol_type = other RNA
gtgccttggtttcctgagcca

SEQ ID NO: 229 - RNA, 21 nt, synthetic construct
  misc_feature 1..21: note = Pt2960sense
  source 1..21: mol_type = other RNA
tgccttggtttcctgagccac

SEQ ID NO: 230 - RNA, 21 nt, synthetic construct
  misc_feature 1..21: note = Pt2962sense
  source 1..21: mol_type = other RNA
ccttggtttcctgagccacct

SEQ ID NO: 231 - RNA, 21 nt, synthetic construct
  misc_feature 1..21: note = Pt2963sense
  source 1..21: mol_type = other RNA
cttggtttcctgagccacctt

SEQ ID NO: 232 - RNA, 21 nt, synthetic construct
  misc_feature 1..21: note = Pt2964sense
  source 1..21: mol_type = other RNA
ttggtttcctgagccaccttt

SEQ ID NO: 233 - RNA, 21 nt, synthetic construct
  misc_feature 1..21: note = Pt2965sense
  source 1..21: mol_type = other RNA
tggtttcctgagccaccttta

SEQ ID NO: 234 - RNA, 21 nt, synthetic construct
  misc_feature 1..21: note = Pt2966sense
  source 1..21: mol_type = other RNA
ggtttcctgagccacctttac

SEQ ID NO: 235 - RNA, 21 nt, synthetic construct
  misc_feature 1..21: note = Pt2967sense
  source 1..21: mol_type = other RNA
gtttcctgagccacctttact

SEQ ID NO: 236 - RNA, 21 nt, synthetic construct
  misc_feature 1..21: note = Pt2968sense
  source 1..21: mol_type = other RNA
tttcctgagccacctttactc

SEQ ID NO: 237 - RNA, 21 nt, synthetic construct
  misc_feature 1..21: note = Pt2969sense
  source 1..21: mol_type = other RNA
ttcctgagccacctttactct

SEQ ID NO: 238 - RNA, 21 nt, synthetic construct
  misc_feature 1..21: note = Pt2970sense
  source 1..21: mol_type = other RNA
tcctgagccacctttactctg

SEQ ID NO: 239 - RNA, 21 nt, synthetic construct
  misc_feature 1..21: note = Pt2972sense
  source 1..21: mol_type = other RNA
ctgagccacctttactctgct

SEQ ID NO: 240 - RNA, 21 nt, synthetic construct
  misc_feature 1..21: note = Pt2977sense
  source 1..21: mol_type = other RNA
ccacctttactctgctctatg

SEQ ID NO: 241 - RNA, 21 nt, synthetic construct
  misc_feature 1..21: note = Pt2979sense
  source 1..21: mol_type = other RNA
acctttactctgctctatgcc

SEQ ID NO: 242 - RNA, 21 nt, synthetic construct
  misc_feature 1..21: note = Pt2980sense
  source 1..21: mol_type = other RNA
cctttactctgctctatgcca

SEQ ID NO: 243 - RNA, 21 nt, synthetic construct
  misc_feature 1..21: note = Pt2981sense
  source 1..21: mol_type = other RNA
ctttactctgctctatgccag

SEQ ID NO: 244 - RNA, 21 nt, synthetic construct
  misc_feature 1..21: note = Pt2982sense
  source 1..21: mol_type = other RNA
tttactctgctctatgccagg

SEQ ID NO: 245 - RNA, 21 nt, synthetic construct
  misc_feature 1..21: note = Pt2983sense
  source 1..21: mol_type = other RNA
ttactctgctctatgccaggc

SEQ ID NO: 246 - RNA, 21 nt, synthetic construct
  misc_feature 1..21: note = Pt2985sense
  source 1..21: mol_type = other RNA
actctgctctatgccaggctg

SEQ ID NO: 247 - RNA, 21 nt, synthetic construct
  misc_feature 1..21: note = Pt2987sense
  source 1..21: mol_type = other RNA
tctgctctatgccaggctgtg

SEQ ID NO: 248 - RNA, 21 nt, synthetic construct
  misc_feature 1..21: note = Pt2989sense
  source 1..21: mol_type = other RNA
tgctctatgccaggctgtgct

SEQ ID NO: 249 - RNA, 21 nt, synthetic construct
  misc_feature 1..21: note = Pt2990sense
  source 1..21: mol_type = other RNA
gctctatgccaggctgtgcta

SEQ ID NO: 250 - RNA, 21 nt, synthetic construct
  misc_feature 1..21: note = Pt2991sense
  source 1..21: mol_type = other RNA
ctctatgccaggctgtgctag

SEQ ID NO: 251 - RNA, 21 nt, synthetic construct
  misc_feature 1..21: note = Pt3037sense
  source 1..21: mol_type = other RNA
agccatcacctaggactgact

SEQ ID NO: 252 - RNA, 21 nt, synthetic construct
  misc_feature 1..21: note = Pt3038sense
  source 1..21: mol_type = other RNA
gccatcacctaggactgactc

SEQ ID NO: 253 - RNA, 21 nt, synthetic construct
  misc_feature 1..21: note = Pt3039sense
  source 1..21: mol_type = other RNA
ccatcacctaggactgactcg

SEQ ID NO: 254 - RNA, 21 nt, synthetic construct
  misc_feature 1..21: note = Pt3042sense
  source 1..21: mol_type = other RNA
tcacctaggactgactcggca

SEQ ID NO: 255 - RNA, 21 nt, synthetic construct
  misc_feature 1..21: note = Pt3043sense
  source 1..21: mol_type = other RNA
cacctaggactgactcggcag

SEQ ID NO: 256 - RNA, 21 nt, synthetic construct
  misc_feature 1..21: note = Pt3125sense
  source 1..21: mol_type = other RNA
cgcacccctacttcacagagg

SEQ ID NO: 257 - RNA, 21 nt, synthetic construct
  misc_feature 1..21: note = Pt3126sense
  source 1..21: mol_type = other RNA
gcacccctacttcacagagga

SEQ ID NO: 258 - RNA, 21 nt, synthetic construct
  misc_feature 1..21: note = Pt3127sense
  source 1..21: mol_type = other RNA
cacccctacttcacagaggaa

SEQ ID NO: 259 - RNA, 21 nt, synthetic construct
  misc_feature 1..21: note = Pt3138sense
  source 1..21: mol_type = other RNA
cacagaggaagaaacctggaa

SEQ ID NO: 260 - RNA, 21 nt, synthetic construct
  misc_feature 1..21: note = Pt3139sense
  source 1..21: mol_type = other RNA
acagaggaagaaacctggaac

SEQ ID NO: 261 - RNA, 21 nt, synthetic construct
  misc_feature 1..21: note = Pt3141sense
  source 1..21: mol_type = other RNA
agaggaagaaacctggaacca

SEQ ID NO: 262 - RNA, 21 nt, synthetic construct
  misc_feature 1..21: note = Pt3177sense
  source 1..21: mol_type = other RNA
ccaagctcacacagcaggaac

SEQ ID NO: 263 - RNA, 21 nt, synthetic construct
  misc_feature 1..21: note = Pt3178sense
  source 1..21: mol_type = other RNA
caagctcacacagcaggaact

SEQ ID NO: 264 - RNA, 21 nt, synthetic construct
  misc_feature 1..21: note = Pt3179sense
  source 1..21: mol_type = other RNA
aagctcacacagcaggaactg

SEQ ID NO: 265 - RNA, 21 nt, synthetic construct
  misc_feature 1..21: note = Pt3180sense
  source 1..21: mol_type = other RNA
agctcacacagcaggaactga

SEQ ID NO: 266 - RNA, 21 nt, synthetic construct
  misc_feature 1..21: note = Pt3185sense
  source 1..21: mol_type = other RNA
acacagcaggaactgagccag

SEQ ID NO: 267 - RNA, 21 nt, synthetic construct
  misc_feature 1..21: note = Pt3186sense
  source 1..21: mol_type = other RNA
cacagcaggaactgagccaga

SEQ ID NO: 268 - RNA, 21 nt, synthetic construct
  misc_feature 1..21: note = Pt3187sense
  source 1..21: mol_type = other RNA
acagcaggaactgagccagaa

SEQ ID NO: 269 - RNA, 21 nt, synthetic construct
  misc_feature 1..21: note = Pt3188sense
  source 1..21: mol_type = other RNA
cagcaggaactgagccagaaa

SEQ ID NO: 270 - RNA, 21 nt, synthetic construct
  misc_feature 1..21: note = Pt3189sense
  source 1..21: mol_type = other RNA
agcaggaactgagccagaaac

SEQ ID NO: 271 - RNA, 21 nt, synthetic construct
  misc_feature 1..21: note = Pt3190sense
  source 1..21: mol_type = other RNA
gcaggaactgagccagaaacg

SEQ ID NO: 272 - RNA, 21 nt, synthetic construct
  misc_feature 1..21: note = Pt3191sense
  source 1..21: mol_type = other RNA
caggaactgagccagaaacgc

SEQ ID NO: 273 - RNA, 21 nt, synthetic construct
  misc_feature 1..21: note = Pt3192sense
  source 1..21: mol_type = other RNA
aggaactgagccagaaacgca

SEQ ID NO: 274 - RNA, 21 nt, synthetic construct
  misc_feature 1..21: note = Pt3193sense
  source 1..21: mol_type = other RNA
ggaactgagccagaaacgcag

SEQ ID NO: 275 - RNA, 21 nt, synthetic construct
  misc_feature 1..21: note = Pt3194sense
  source 1..21: mol_type = other RNA
gaactgagccagaaacgcaga

SEQ ID NO: 276 - RNA, 21 nt, synthetic construct
  misc_feature 1..21: note = Pt3199sense
  source 1..21: mol_type = other RNA
gagccagaaacgcagattggg

SEQ ID NO: 277 - RNA, 21 nt, synthetic construct
  misc_feature 1..21: note = Pt3200sense
  source 1..21: mol_type = other RNA
agccagaaacgcagattgggc

SEQ ID NO: 278 - RNA, 21 nt, synthetic construct
  misc_feature 1..21: note = Pt3205sense
  source 1..21: mol_type = other RNA
gaaacgcagattgggctggct

SEQ ID NO: 279 - RNA, 21 nt, synthetic construct
  misc_feature 1..21: note = Pt3206sense
  source 1..21: mol_type = other RNA
aaacgcagattgggctggctc

SEQ ID NO: 280 - RNA, 21 nt, synthetic construct
  misc_feature 1..21: note = Pt3207sense
  source 1..21: mol_type = other RNA
aacgcagattgggctggctct

SEQ ID NO: 281 - RNA, 21 nt, synthetic construct
  misc_feature 1..21: note = Pt3234sense
  source 1..21: mol_type = other RNA
aagcctcttcttacttcaccc

SEQ ID NO: 282 - RNA, 21 nt, synthetic construct
  misc_feature 1..21: note = Pt3235sense
  source 1..21: mol_type = other RNA
agcctcttcttacttcacccg

SEQ ID NO: 283 - RNA, 21 nt, synthetic construct
  misc_feature 1..21: note = Pt3236sense
  source 1..21: mol_type = other RNA
gcctcttcttacttcacccgg

SEQ ID NO: 284 - RNA, 21 nt, synthetic construct
  misc_feature 1..21: note = Pt3237sense
  source 1..21: mol_type = other RNA
cctcttcttacttcacccggc

SEQ ID NO: 285 - RNA, 21 nt, synthetic construct
  misc_feature 1..21: note = Pt3238sense
  source 1..21: mol_type = other RNA
ctcttcttacttcacccggct

SEQ ID NO: 286 - RNA, 21 nt, synthetic construct
  misc_feature 1..21: note = Pt3239sense
  source 1..21: mol_type = other RNA
tcttcttacttcacccggctg

SEQ ID NO: 287 - RNA, 21 nt, synthetic construct
  misc_feature 1..21: note = Pt3240sense
  source 1..21: mol_type = other RNA
cttcttacttcacccggctgg

SEQ ID NO: 288 - RNA, 21 nt, synthetic construct
  misc_feature 1..21: note = Pt3241sense
  source 1..21: mol_type = other RNA
ttcttacttcacccggctggg

SEQ ID NO: 289 - RNA, 21 nt, synthetic construct
  misc_feature 1..21: note = Pt3243sense
  source 1..21: mol_type = other RNA
cttacttcacccggctgggct

SEQ ID NO: 290 - RNA, 21 nt, synthetic construct
  misc_feature 1..21: note = Pt3275sense
  source 1..21: mol_type = other RNA
cgggtaacagtgaggctggga

SEQ ID NO: 291 - RNA, 21 nt, synthetic construct
  misc_feature 1..21: note = Pt3276sense
  source 1..21: mol_type = other RNA
gggtaacagtgaggctgggaa

SEQ ID NO: 292 - RNA, 21 nt, synthetic construct
  misc_feature 1..21: note = Pt3302sense
  source 1..21: mol_type = other RNA
acacagaccaggaagctcggt

SEQ ID NO: 293 - RNA, 21 nt, synthetic construct
  misc_feature 1..21: note = Pt3303sense
  source 1..21: mol_type = other RNA
cacagaccaggaagctcggtg

SEQ ID NO: 294 - RNA, 21 nt, synthetic construct
  misc_feature 1..21: note = Pt3304sense
  source 1..21: mol_type = other RNA
acagaccaggaagctcggtga

SEQ ID NO: 295 - RNA, 21 nt, synthetic construct
  misc_feature 1..21: note = Pt3306sense
  source 1..21: mol_type = other RNA
agaccaggaagctcggtgagt

SEQ ID NO: 296 - RNA, 21 nt, synthetic construct
  misc_feature 1..21: note = Pt3308sense
  source 1..21: mol_type = other RNA
accaggaagctcggtgagtga

SEQ ID NO: 297 - RNA, 21 nt, synthetic construct
  misc_feature 1..21: note = Pt3309sense
  source 1..21: mol_type = other RNA
ccaggaagctcggtgagtgat

SEQ ID NO: 298 - RNA, 21 nt, synthetic construct
  misc_feature 1..21: note = Pt3310sense
  source 1..21: mol_type = other RNA
caggaagctcggtgagtgatg

SEQ ID NO: 299 - RNA, 21 nt, synthetic construct
  misc_feature 1..21: note = Pt3313sense
  source 1..21: mol_type = other RNA
gaagctcggtgagtgatggca

SEQ ID NO: 300 - RNA, 21 nt, synthetic construct
  misc_feature 1..21: note = Pt3315sense
  source 1..21: mol_type = other RNA
agctcggtgagtgatggcaga

SEQ ID NO: 301 - RNA, 21 nt, synthetic construct
  misc_feature 1..21: note = Pt3317sense
  source 1..21: mol_type = other RNA
ctcggtgagtgatggcagaac

SEQ ID NO: 302 - RNA, 21 nt, synthetic construct
  misc_feature 1..21: note = Pt3319sense
  source 1..21: mol_type = other RNA
cggtgagtgatggcagaacga

SEQ ID NO: 303 - RNA, 21 nt, synthetic construct
  misc_feature 1..21: note = Pt3321sense
  source 1..21: mol_type = other RNA
gtgagtgatggcagaacgatg

SEQ ID NO: 304 - RNA, 21 nt, synthetic construct
  misc_feature 1..21: note = Pt3322sense
  source 1..21: mol_type = other RNA
tgagtgatggcagaacgatgc

SEQ ID NO: 305 - RNA, 21 nt, synthetic construct
  misc_feature 1..21: note = Pt3382sense
  source 1..21: mol_type = other RNA
attcactggcctggcggagat

SEQ ID NO: 306 - RNA, 21 nt, synthetic construct
  misc_feature 1..21: note = Pt3390sense
  source 1..21: mol_type = other RNA
gcctggcggagatgcttctaa

SEQ ID NO: 307 - RNA, 21 nt, synthetic construct
  misc_feature 1..21: note = Pt3394sense
  source 1..21: mol_type = other RNA
ggcggagatgcttctaaggca

SEQ ID NO: 308 - RNA, 21 nt, synthetic construct
  misc_feature 1..21: note = Pt3431sense
  source 1..21: mol_type = other RNA
ccaacaactgtccctccttga

SEQ ID NO: 309 - RNA, 21 nt, synthetic construct
  misc_feature 1..21: note = Pt3432sense
  source 1..21: mol_type = other RNA
caacaactgtccctccttgag

SEQ ID NO: 310 - RNA, 21 nt, synthetic construct
  misc_feature 1..21: note = Pt3433sense
  source 1..21: mol_type = other RNA
aacaactgtccctccttgagc

SEQ ID NO: 311 - RNA, 21 nt, synthetic construct
  misc_feature 1..21: note = Pt3434sense
  source 1..21: mol_type = other RNA
acaactgtccctccttgagca

SEQ ID NO: 312 - RNA, 21 nt, synthetic construct
  misc_feature 1..21: note = Pt3435sense
  source 1..21: mol_type = other RNA
caactgtccctccttgagcac

SEQ ID NO: 313 - RNA, 21 nt, synthetic construct
  misc_feature 1..21: note = Pt3436sense
  source 1..21: mol_type = other RNA
aactgtccctccttgagcacc

SEQ ID NO: 314 - RNA, 21 nt, synthetic construct
  misc_feature 1..21: note = Pt3437sense
  source 1..21: mol_type = other RNA
actgtccctccttgagcacca

SEQ ID NO: 315 - RNA, 21 nt, synthetic construct
  misc_feature 1..21: note = Pt3438sense
  source 1..21: mol_type = other RNA
ctgtccctccttgagcaccag

SEQ ID NO: 316 - RNA, 21 nt, synthetic construct
  misc_feature 1..21: note = Pt3461sense
  source 1..21: mol_type = other RNA
ccacccaagcaagcagacatt

SEQ ID NO: 317 - RNA, 21 nt, synthetic construct
  misc_feature 1..21: note = Pt3465sense
  source 1..21: mol_type = other RNA
ccaagcaagcagacatttatc

SEQ ID NO: 318 - RNA, 21 nt, synthetic construct
  misc_feature 1..21: note = Pt3468sense
  source 1..21: mol_type = other RNA
agcaagcagacatttatcttt

SEQ ID NO: 319 - RNA, 21 nt, synthetic construct
  misc_feature 1..21: note = Pt3490sense
  source 1..21: mol_type = other RNA
gggtctgtcctctctgttgcc

SEQ ID NO: 320 - RNA, 21 nt, synthetic construct
  misc_feature 1..21: note = Pt3491sense
  source 1..21: mol_type = other RNA
ggtctgtcctctctgttgcct

SEQ ID NO: 321 - RNA, 21 nt, synthetic construct
  misc_feature 1..21: note = Pt3492sense
  source 1..21: mol_type = other RNA
gtctgtcctctctgttgcctt

SEQ ID NO: 322 - RNA, 21 nt, synthetic construct
  misc_feature 1..21: note = Pt3493sense
  source 1..21: mol_type = other RNA
tctgtcctctctgttgccttt

SEQ ID NO: 323 - RNA, 21 nt, synthetic construct
  misc_feature 1..21: note = Pt3552sense
  source 1..21: mol_type = other RNA
cttgaagatatttattctggg

SEQ ID NO: 324 - RNA, 21 nt, synthetic construct
  misc_feature 1..21: note = Pt3553sense
  source 1..21: mol_type = other RNA
ttgaagatatttattctgggt

SEQ ID NO: 325 - RNA, 21 nt, synthetic construct
  misc_feature 1..21: note = PPC1sense
  source 1..21: mol_type = other RNA
ctgttttgcttttgtaacttg

SEQ ID NO: 326 - RNA, 21 nt, synthetic construct
  misc_feature 1..21: note = PPC2sense
  source 1..21: mol_type = other RNA
  modified_base 11: mod_base = OTHER; note = thymine
ctagacctgttttgcttttgt

SEQ ID NO: 327 - RNA, 21 nt, synthetic construct
  misc_feature 1..21: note = P341-2sense
  source 1..21: mol_type = other RNA
  modified_base 20..21: mod_base = OTHER; note = thymine
aacttttctagacctgttttt

SEQ ID NO: 328 - RNA, 23 nt, synthetic construct
  misc_feature 1..23: note = Ps178antisense
  source 1..23: mol_type = other RNA
aggactgtgcaggagctgaagtt

SEQ ID NO: 329 - RNA, 23 nt, synthetic construct
  misc_feature 1..23: note = Ps2428antisense
  source 1..23: mol_type = other RNA
agagagggacaagtcggaaccat

SEQ ID NO: 330 - RNA, 23 nt, synthetic construct
  misc_feature 1..23: note = Ps2537antisense
  source 1..23: mol_type = other RNA
cagagtgagtgagttccaggcaa

SEQ ID NO: 331 - RNA, 23 nt, synthetic construct
  misc_feature 1..23: note = Ps2610antisense
  source 1..23: mol_type = other RNA
cctgtttgaatggtgaaatgccc

SEQ ID NO: 332 - RNA, 23 nt, synthetic construct
  misc_feature 1..23: note = Ps2617antisense
  source 1..23: mol_type = other RNA
agctcgacctgtttgaatggtga

SEQ ID NO: 333 - RNA, 23 nt, synthetic construct
  misc_feature 1..23: note = Ps2674antisense
  source 1..23: mol_type = other RNA
aagtcattctgcccacggacatc

SEQ ID NO: 334 - RNA, 23 nt, synthetic construct
  misc_feature 1..23: note = Ps2683antisense
  source 1..23: mol_type = other RNA
gctcaataaaagtcattctgccc

SEQ ID NO: 335 - RNA, 23 nt, synthetic construct
  misc_feature 1..23: note = Ps2719antisense
  source 1..23: mol_type = other RNA
gagacctgaggattgaatgcctg

SEQ ID NO: 336 - RNA, 23 nt, synthetic construct
  misc_feature 1..23: note = Ps2721antisense
  source 1..23: mol_type = other RNA
tggagacctgaggattgaatgcc

SEQ ID NO: 337 - RNA, 23 nt, synthetic construct
  misc_feature 1..23: note = Ps2723antisense
  source 1..23: mol_type = other RNA
ggtggagacctgaggattgaatg

SEQ ID NO: 338 - RNA, 23 nt, synthetic construct
  misc_feature 1..23: note = Ps2725antisense
  source 1..23: mol_type = other RNA
ttggtggagacctgaggattgaa

SEQ ID NO: 339 - RNA, 23 nt, synthetic construct
  misc_feature 1..23: note = Ps2740antisense
  source 1..23: mol_type = other RNA
aagaatcctgcctccttggtgga

SEQ ID NO: 340 - RNA, 23 nt, synthetic construct
  misc_feature 1..23: note = Ps2749antisense
  source 1..23: mol_type = other RNA
atccatgggaagaatcctgcctc

SEQ ID NO: 341 - RNA, 23 nt, synthetic construct
  misc_feature 1..23: note = Ps2751antisense
  source 1..23: mol_type = other RNA
ctatccatgggaagaatcctgcc

SEQ ID NO: 342 - RNA, 23 nt, synthetic construct
  misc_feature 1..23: note = Ps2817antisense
  source 1..23: mol_type = other RNA
ccatcagcacctttcacactcac

SEQ ID NO: 343 - RNA, 23 nt, synthetic construct
  misc_feature 1..23: note = Ps2824antisense
  source 1..23: mol_type = other RNA
atgagggccatcagcacctttca

SEQ ID NO: 344 - RNA, 23 nt, synthetic construct
  misc_feature 1..23: note = Ps2836antisense
  source 1..23: mol_type = other RNA
agttagctggagatgagggccat

SEQ ID NO: 345 - RNA, 23 nt, synthetic construct
  misc_feature 1..23: note = Ps2880antisense
  source 1..23: mol_type = other RNA
agctaagcctccattaatcaggg

SEQ ID NO: 346 - RNA, 23 nt, synthetic construct
  misc_feature 1..23: note = Ps2884antisense
  source 1..23: mol_type = other RNA
agaaagctaagcctccattaatc

SEQ ID NO: 347 - RNA, 23 nt, synthetic construct
  misc_feature 1..23: note = Ps2892antisense
  source 1..23: mol_type = other RNA
tgccatccagaaagctaagcctc

SEQ ID NO: 348 - RNA, 23 nt, synthetic construct
  misc_feature 1..23: note = Ps2971antisense
  source 1..23: mol_type = other RNA
gcagagtaaaggtggctcaggaa

SEQ ID NO: 349 - RNA, 23 nt, synthetic construct
  misc_feature 1..23: note = Ps2978antisense
  source 1..23: mol_type = other RNA
gcatagagcagagtaaaggtggc

SEQ ID NO: 350 - RNA, 23 nt, synthetic construct
  misc_feature 1..23: note = Ps2984antisense
  source 1..23: mol_type = other RNA
agcctggcatagagcagagtaaa

SEQ ID NO: 351 - RNA, 23 nt, synthetic construct
  misc_feature 1..23: note = Ps2986antisense
  source 1..23: mol_type = other RNA
acagcctggcatagagcagagta

SEQ ID NO: 352 - RNA, 23 nt, synthetic construct
  misc_feature 1..23: note = Ps3057antisense
  source 1..23: mol_type = other RNA
tgcaccactgcacactgccgagt

SEQ ID NO: 353 - RNA, 23 nt, synthetic construct
  misc_feature 1..23: note = Ps3117antisense
  source 1..23: mol_type = other RNA
aagtaggggtgcgaatgtgtacc

SEQ ID NO: 354 - RNA, 23 nt, synthetic construct
  misc_feature 1..23: note = Ps3119antisense
  source 1..23: mol_type = other RNA
tgaagtaggggtgcgaatgtgta

SEQ ID NO: 355 - RNA, 23 nt, synthetic construct
  misc_feature 1..23: note = Ps3122antisense
  source 1..23: mol_type = other RNA
ctgtgaagtaggggtgcgaatgt

SEQ ID NO: 356 - RNA, 23 nt, synthetic construct
  misc_feature 1..23: note = Ps3124antisense
  source 1..23: mol_type = other RNA
ctctgtgaagtaggggtgcgaat

SEQ ID NO: 357 - RNA, 23 nt, synthetic construct
  misc_feature 1..23: note = Ps3129antisense
  source 1..23: mol_type = other RNA
tcttcctctgtgaagtaggggtg

SEQ ID NO: 358 - RNA, 23 nt, synthetic construct
  misc_feature 1..23: note = Ps3140antisense
  source 1..23: mol_type = other RNA
ggttccaggtttcttcctctgtg

SEQ ID NO: 359 - RNA, 23 nt, synthetic construct
  misc_feature 1..23: note = Ps3196antisense
  source 1..23: mol_type = other RNA
aatctgcgtttctggctcagttc

SEQ ID NO: 360 - RNA, 23 nt, synthetic construct
  misc_feature 1..23: note = Ps3198antisense
  source 1..23: mol_type = other RNA
ccaatctgcgtttctggctcagt

SEQ ID NO: 361 - RNA, 23 nt, synthetic construct
  misc_feature 1..23: note = Ps3233antisense
  source 1..23: mol_type = other RNA
ggtgaagtaagaagaggcttggc

SEQ ID NO: 362 - RNA, 23 nt, synthetic construct
  misc_feature 1..23: note = Ps3316antisense
  source 1..23: mol_type = other RNA
ttctgccatcactcaccgagctt

SEQ ID NO: 363 - RNA, 23 nt, synthetic construct
  misc_feature 1..23: note = Ps3320antisense
  source 1..23: mol_type = other RNA
atcgttctgccatcactcaccga

SEQ ID NO: 364 - RNA, 23 nt, synthetic construct
  misc_feature 1..23: note = Ps3464antisense
  source 1..23: mol_type = other RNA
ataaatgtctgcttgcttgggtg

SEQ ID NO: 365 - RNA, 23 nt, synthetic construct
  misc_feature 1..23: note = Ps3466antisense
  source 1..23: mol_type = other RNA
agataaatgtctgcttgcttggg

SEQ ID NO: 366 - RNA, 23 nt, synthetic construct
  misc_feature 1..23: note = Ps3489antisense
  source 1..23: mol_type = other RNA
gcaacagagaggacagacccaaa

SEQ ID NO: 367 - RNA, 23 nt, synthetic construct
  misc_feature 1..23: note = Ps3543antisense
  source 1..23: mol_type = other RNA
aatatcttcaagttacaaaagca

SEQ ID NO: 368 - RNA, 23 nt, synthetic construct
  misc_feature 1..23: note = Ps3548antisense
  source 1..23: mol_type = other RNA
gaataaatatcttcaagttacaa

SEQ ID NO: 369 - RNA, 23 nt, synthetic construct
  misc_feature 1..23: note = Ps3554antisense
  source 1..23: mol_type = other RNA
aacccagaataaatatcttcaag

SEQ ID NO: 370 - RNA, 23 nt, synthetic construct
  misc_feature 1..23: note = P446antisense
  source 1..23: mol_type = other RNA
ttccgtgctcgggtgcttcggcc

SEQ ID NO: 371 - RNA, 23 nt, synthetic construct
  misc_feature 1..23: note = P516antisense
  source 1..23: mol_type = other RNA
ttcagcaccaccacgtaggtgcc

SEQ ID NO: 372 - RNA, 23 nt, synthetic construct
  misc_feature 1..23: note = P607antisense
  source 1..23: mol_type = other RNA
atgcaggatcttggtgaggtatc

SEQ ID NO: 373 - RNA, 23 nt, synthetic construct
  misc_feature 1..23: note = P612antisense
  source 1..23: mol_type = other RNA
aagacatgcaggatcttggtgag

SEQ ID NO: 374 - RNA, 23 nt, synthetic construct
  misc_feature 1..23: note = P629antisense
  source 1..23: mol_type = other RNA
caggaagaaggccatggaagaca

SEQ ID NO: 375 - RNA, 23 nt, synthetic construct
  misc_feature 1..23: note = P633antisense
  source 1..23: mol_type = other RNA
aagccaggaagaaggccatggaa

SEQ ID NO: 376 - RNA, 23 nt, synthetic construct
  misc_feature 1..23: note = P693antisense
  source 1..23: mol_type = other RNA
tagtcgacatggggcaacttcaa

SEQ ID NO: 377 - RNA, 23 nt, synthetic construct
  misc_feature 1..23: note = P823antisense
  source 1..23: mol_type = other RNA
taggagatacacctccaccaggc

SEQ ID NO: 378 - RNA, 23 nt, synthetic construct
  misc_feature 1..23: note = P835antisense
  source 1..23: mol_type = other RNA
tatgctggtgtctaggagataca

SEQ ID NO: 379 - RNA, 23 nt, synthetic construct
  misc_feature 1..23: note = P839antisense
  source 1..23: mol_type = other RNA
tctgtatgctggtgtctaggaga

SEQ ID NO: 380 - RNA, 23 nt, synthetic construct
  misc_feature 1..23: note = P842antisense
  source 1..23: mol_type = other RNA
cactctgtatgctggtgtctagg

SEQ ID NO: 381 - RNA, 23 nt, synthetic construct
  misc_feature 1..23: note = P845antisense
  source 1..23: mol_type = other RNA
ggtcactctgtatgctggtgtct

SEQ ID NO: 382 - RNA, 23 nt, synthetic construct
  misc_feature 1..23: note = P854antisense
  source 1..23: mol_type = other RNA
tttcccggtggtcactctgtatg

SEQ ID NO: 383 - RNA, 23 nt, synthetic construct
  misc_feature 1..23: note = P882antisense
  source 1..23: mol_type = other RNA
aagtcggtgaccatgaccctgcc

SEQ ID NO: 384 - RNA, 23 nt, synthetic construct
  misc_feature 1..23: note = P888antisense
  source 1..23: mol_type = other RNA
ttctcgaagtcggtgaccatgac

SEQ ID NO: 385 - RNA, 23 nt, synthetic construct
  misc_feature 1..23: note = P891antisense
  source 1..23: mol_type = other RNA
acattctcgaagtcggtgaccat

SEQ ID NO: 386 - RNA, 23 nt, synthetic construct
  misc_feature 1..23: note = P1066antisense
  source 1..23: mol_type = other RNA
tatgagggtgccgctaaccgtgc

SEQ ID NO: 387 - RNA, 23 nt, synthetic construct
  misc_feature 1..23: note = P1079antisense
  source 1..23: mol_type = other RNA
taaactccaggcctatgagggtg

SEQ ID NO: 388 - RNA, 23 nt, synthetic construct
  misc_feature 1..23: note = P1081antisense
  source 1..23: mol_type = other RNA
aataaactccaggcctatgaggg

SEQ ID NO: 389 - RNA, 23 nt, synthetic construct
  misc_feature 1..23: note = P1085antisense
  source 1..23: mol_type = other RNA
tccgaataaactccaggcctatg

SEQ ID NO: 390 - RNA, 23 nt, synthetic construct
  misc_feature 1..23: note = P1161antisense
  source 1..23: mol_type = other RNA
ttgaggacgcggctgtacccacc

SEQ ID NO: 391 - RNA, 23 nt, synthetic construct
  misc_feature 1..23: note = P1242antisense
  source 1..23: mol_type = other RNA
tagaggcaggcatcgtcccggaa

SEQ ID NO: 392 - RNA, 23 nt, synthetic construct
  misc_feature 1..23: note = P1413antisense
  source 1..23: mol_type = other RNA
tgtgacacaaagcaggtgctgca

SEQ ID NO: 393 - RNA, 23 nt, synthetic construct
  misc_feature 1..23: note = P1514antisense
  source 1..23: mol_type = other RNA
tcagtctctgcctcaactcggcc

SEQ ID NO: 394 - RNA, 23 nt, synthetic construct
  misc_feature 1..23: note = P1518antisense
  source 1..23: mol_type = other RNA
tggatcagtctctgcctcaactc

SEQ ID NO: 395 - RNA, 23 nt, synthetic construct
  misc_feature 1..23: note = P1521antisense
  source 1..23: mol_type = other RNA
aagtggatcagtctctgcctcaa

SEQ ID NO: 396 - RNA, 23 nt, synthetic construct
  misc_feature 1..23: note = P1523antisense
  source 1..23: mol_type = other RNA
agaagtggatcagtctctgcctc

SEQ ID NO: 397 - RNA, 23 nt, synthetic construct
  misc_feature 1..23: note = P1531antisense
  source 1..23: mol_type = other RNA
tttggcagagaagtggatcagtc

SEQ ID NO: 398 - RNA, 23 nt, synthetic construct
  misc_feature 1..23: note = P1533antisense
  source 1..23: mol_type = other RNA
tctttggcagagaagtggatcag

SEQ ID NO: 399 - RNA, 23 nt, synthetic construct
  misc_feature 1..23: note = P1536antisense
  source 1..23: mol_type = other RNA
acatctttggcagagaagtggat

SEQ ID NO: 400 - RNA, 23 nt, synthetic construct
  misc_feature 1..23: note = P1539antisense
  source 1..23: mol_type = other RNA
atgacatctttggcagagaagtg

SEQ ID NO: 401 - RNA, 23 nt, synthetic construct
  misc_feature 1..23: note = P1547antisense
  source 1..23: mol_type = other RNA
cctcattgatgacatctttggca

SEQ ID NO: 402 - RNA, 23 nt, synthetic construct
  misc_feature 1..23: note = P1659antisense
  source 1..23: mol_type = other RNA
tgtgctgaccatacagtcctgca

SEQ ID NO: 403 - RNA, 23 nt, synthetic construct
  misc_feature 1..23: note = P1661antisense
  source 1..23: mol_type = other RNA
agtgtgctgaccatacagtcctg

SEQ ID NO: 404 - RNA, 23 nt, synthetic construct
  misc_feature 1..23: note = P2101antisense
  source 1..23: mol_type = other RNA
cttgactttgcattccagacctg

SEQ ID NO: 405 - RNA, 23 nt, synthetic construct
  misc_feature 1..23: note = P2112antisense
  source 1..23: mol_type = other RNA
attccatgctccttgactttgca

SEQ ID NO: 406 - RNA, 23 nt, synthetic construct
  misc_feature 1..23: note = P2114antisense
  source 1..23: mol_type = other RNA
ggattccatgctccttgactttg

SEQ ID NO: 407 - RNA, 23 nt, synthetic construct
  misc_feature 1..23: note = P2116antisense
  source 1..23: mol_type = other RNA
cgggattccatgctccttgactt

SEQ ID NO: 408 - RNA, 23 nt, synthetic construct
  misc_feature 1..23: note = SP71antisense
  source 1..23: mol_type = other RNA
gaagtaggggtgcgaatgtgtac

SEQ ID NO: 409 - RNA, 23 nt, synthetic construct
  misc_feature 1..23: note = SP73antisense
  source 1..23: mol_type = other RNA
gtgaagtaggggtgcgaatgtgt

SEQ ID NO: 410 - RNA, 23 nt, synthetic construct
  misc_feature 1..23: note = SP74antisense
  source 1..23: mol_type = other RNA
tgtgaagtaggggtgcgaatgtg

SEQ ID NO: 411 - RNA, 23 nt, synthetic construct
  misc_feature 1..23: note = SP76antisense
  source 1..23: mol_type = other RNA
tctgtgaagtaggggtgcgaatg

SEQ ID NO: 412 - RNA, 23 nt, synthetic construct
  misc_feature 1..23: note = SP107antisense
  source 1..23: mol_type = other RNA
atctgcgtttctggctcagttcc

SEQ ID NO: 413 - RNA, 23 nt, synthetic construct
  misc_feature 1..23: note = SP109antisense
  source 1..23: mol_type = other RNA
caatctgcgtttctggctcagtt

SEQ ID NO: 414 - RNA, 23 nt, synthetic construct
  misc_feature 1..23: note = SP133antisense
  source 1..23: mol_type = other RNA
tgaagtaagaagaggcttggctt

SEQ ID NO: 415 - RNA, 23 nt, synthetic construct
  misc_feature 1..23: note = SP134antisense
  source 1..23: mol_type = other RNA
gtgaagtaagaagaggcttggct

SEQ ID NO: 416 - RNA, 23 nt, synthetic construct
  misc_feature 1..23: note = SP227antisense
  source 1..23: mol_type = other RNA
cctgggtgataacggaaaaagtt

SEQ ID NO: 417 - RNA, 23 nt, synthetic construct
  misc_feature 1..23: note = SP300antisense
  source 1..23: mol_type = other RNA
aaatgtctgcttgcttgggtggg

SEQ ID NO: 418 - RNA, 23 nt, synthetic construct
  misc_feature 1..23: note = SP301antisense
  source 1..23: mol_type = other RNA
taaatgtctgcttgcttgggtgg

SEQ ID NO: 419 - RNA, 23 nt, synthetic construct
  misc_feature 1..23: note = SP304antisense
  source 1..23: mol_type = other RNA
aagataaatgtctgcttgcttgg

SEQ ID NO: 420 - RNA, 23 nt, synthetic construct
  misc_feature 1..23: note = SP305antisense
  source 1..23: mol_type = other RNA
ccaaaagataaatgtctgcttgc

SEQ ID NO: 421 - RNA, 23 nt, synthetic construct
  misc_feature 1..23: note = SP306antisense
  source 1..23: mol_type = other RNA
cccaaaagataaatgtctgcttg

SEQ ID NO: 422 - RNA, 23 nt, synthetic construct
  misc_feature 1..23: note = SP326antisense
  source 1..23: mol_type = other RNA
aaaaaggcaacagagaggacaga

SEQ ID NO: 423 - RNA, 23 nt, synthetic construct
  misc_feature 1..23: note = SP327antisense
  source 1..23: mol_type = other RNA
gtaaaaaggcaacagagaggaca

SEQ ID NO: 424 - RNA, 23 nt, synthetic construct
  misc_feature 1..23: note = SP332antisense
  source 1..23: mol_type = other RNA
aaaagttggctgtaaaaaggcaa

SEQ ID NO: 425 - RNA, 23 nt, synthetic construct
  misc_feature 1..23: note = SP334antisense
  source 1..23: mol_type = other RNA
tctagaaaagttggctgtaaaaa

SEQ ID NO: 426 - RNA, 23 nt, synthetic construct
  misc_feature 1..23: note = SP340antisense
  source 1..23: mol_type = other RNA
aacaggtctagaaaagttggctg

SEQ ID NO: 427 - RNA, 23 nt, synthetic construct
  misc_feature 1..23: note = SP341antisense
  source 1..23: mol_type = other RNA
aaacaggtctagaaaagttggct

SEQ ID NO: 428 - RNA, 23 nt, synthetic construct
  misc_feature 1..23: note = SP342antisense
  source 1..23: mol_type = other RNA
aaaacaggtctagaaaagttggc

SEQ ID NO: 429 - RNA, 23 nt, synthetic construct
  misc_feature 1..23: note = SP343antisense
  source 1..23: mol_type = other RNA
caaaacaggtctagaaaagttgg

SEQ ID NO: 430 - RNA, 23 nt, synthetic construct
  misc_feature 1..23: note = SP344antisense
  source 1..23: mol_type = other RNA
gcaaaacaggtctagaaaagttg

SEQ ID NO: 431 - RNA, 23 nt, synthetic construct
  misc_feature 1..23: note = SP345antisense
  source 1..23: mol_type = other RNA
agcaaaacaggtctagaaaagtt

SEQ ID NO: 432 - RNA, 23 nt, synthetic construct
  misc_feature 1..23: note = SP348antisense
  source 1..23: mol_type = other RNA
aaaagcaaaacaggtctagaaaa

SEQ ID NO: 433 - RNA, 23 nt, synthetic construct
  misc_feature 1..23: note = SP349antisense
  source 1..23: mol_type = other RNA
caaaagcaaaacaggtctagaaa

SEQ ID NO: 434 - RNA, 23 nt, synthetic construct
  misc_feature 1..23: note = SP351antisense
  source 1..23: mol_type = other RNA
ttacaaaagcaaaacaggtctag

SEQ ID NO: 435 - RNA, 23 nt, synthetic construct
  misc_feature 1..23: note = SP357antisense
  source 1..23: mol_type = other RNA
gctacaaaacccagaataaatat

SEQ ID NO: 436 - RNA, 23 nt, synthetic construct
  misc_feature 1..23: note = Pt608antisense
  source 1..23: mol_type = other RNA
catgcaggatcttggtgaggtat

SEQ ID NO: 437 - RNA, 23 nt, synthetic construct
  misc_feature 1..23: note = Pt609antisense
  source 1..23: mol_type = other RNA
acatgcaggatcttggtgaggta

SEQ ID NO: 438 - RNA, 23 nt, synthetic construct
  misc_feature 1..23: note = Pt692antisense
  source 1..23: mol_type = other RNA
agtcgacatggggcaacttcaag

SEQ ID NO: 439 - RNA, 23 nt, synthetic construct
  misc_feature 1..23: note = Pt694antisense
  source 1..23: mol_type = other RNA
gtagtcgacatggggcaacttca

SEQ ID NO: 440 - RNA, 23 nt, synthetic construct
  misc_feature 1..23: note = Pt695antisense
  source 1..23: mol_type = other RNA
tgtagtcgacatggggcaacttc

SEQ ID NO: 441 - RNA, 23 nt, synthetic construct
  misc_feature 1..23: note = Pt837antisense
  source 1..23: mol_type = other RNA
tgtatgctggtgtctaggagata

SEQ ID NO: 442 - RNA, 23 nt, synthetic construct
  misc_feature 1..23: note = Pt838antisense
  source 1..23: mol_type = other RNA
ctgtatgctggtgtctaggagat

SEQ ID NO: 443 - RNA, 23 nt, synthetic construct
  misc_feature 1..23: note = Pt840antisense
  source 1..23: mol_type = other RNA
ctctgtatgctggtgtctaggag

SEQ ID NO: 444 - RNA, 23 nt, synthetic construct
  misc_feature 1..23: note = Pt841antisense
  source 1..23: mol_type = other RNA
actctgtatgctggtgtctagga

SEQ ID NO: 445 - RNA, 23 nt, synthetic construct
  misc_feature 1..23: note = Pt844antisense
  source 1..23: mol_type = other RNA
gtcactctgtatgctggtgtcta

SEQ ID NO: 446 - RNA, 23 nt, synthetic construct
  misc_feature 1..23: note = Pt847antisense
  source 1..23: mol_type = other RNA
gtggtcactctgtatgctggtgt

SEQ ID NO: 447 - RNA, 23 nt, synthetic construct
  misc_feature 1..23: note = Pt848antisense
  source 1..23: mol_type = other RNA
ggtggtcactctgtatgctggtg

SEQ ID NO: 448 - RNA, 23 nt, synthetic construct
  misc_feature 1..23: note = Pt855antisense
  source 1..23: mol_type = other RNA
atttcccggtggtcactctgtat

SEQ ID NO: 449 - RNA, 23 nt, synthetic construct
  misc_feature 1..23: note = Pt856antisense
  source 1..23: mol_type = other RNA
gatttcccggtggtcactctgta

SEQ ID NO: 450 - RNA, 23 nt, synthetic construct
  misc_feature 1..23: note = Pt889antisense
  source 1..23: mol_type = other RNA
attctcgaagtcggtgaccatga

SEQ ID NO: 451 - RNA, 23 nt, synthetic construct
  misc_feature 1..23: note = Pt890antisense
  source 1..23: mol_type = other RNA
cattctcgaagtcggtgaccatg

SEQ ID NO: 452 - RNA, 23 nt, synthetic construct
  misc_feature 1..23: note = Pt892antisense
  source 1..23: mol_type = other RNA
cacattctcgaagtcggtgacca

SEQ ID NO: 453 - RNA, 23 nt, synthetic construct
  misc_feature 1..23: note = Pt941antisense
  source 1..23: mol_type = other RNA
tgtcacacttgctggcctgtctg

SEQ ID NO: 454 - RNA, 23 nt, synthetic construct
  misc_feature 1..23: note = Pt1080antisense
  source 1..23: mol_type = other RNA
ataaactccaggcctatgagggt

SEQ ID NO: 455 - RNA, 23 nt, synthetic construct
  misc_feature 1..23: note = Pt1082antisense
  source 1..23: mol_type = other RNA
gaataaactccaggcctatgagg

SEQ ID NO: 456 - RNA, 23 nt, synthetic construct
  misc_feature 1..23: note = Pt1083antisense
  source 1..23: mol_type = other RNA
cgaataaactccaggcctatgag

SEQ ID NO: 457 - RNA, 23 nt, synthetic construct
  misc_feature 1..23: note = Pt1084antisense
  source 1..23: mol_type = other RNA
ccgaataaactccaggcctatga

SEQ ID NO: 458 - RNA, 23 nt, synthetic construct
  misc_feature 1..23: note = Pt1086antisense
  source 1..23: mol_type = other RNA
ttccgaataaactccaggcctat

SEQ ID NO: 459 - RNA, 23 nt, synthetic construct
  misc_feature 1..23: note = Pt1087antisense
  source 1..23: mol_type = other RNA
tttccgaataaactccaggccta

SEQ ID NO: 460 - RNA, 23 nt, synthetic construct
  misc_feature 1..23: note = Pt1275antisense
  source 1..23: mol_type = other RNA
actgtgatgacctcgggagctga

SEQ ID NO: 461 - RNA, 23 nt, synthetic construct
  misc_feature 1..23: note = Pt1516antisense
  source 1..23: mol_type = other RNA
gatcagtctctgcctcaactcgg

SEQ ID NO: 462 - RNA, 23 nt, synthetic construct
  misc_feature 1..23: note = Pt1517antisense
  source 1..23: mol_type = other RNA
ggatcagtctctgcctcaactcg

SEQ ID NO: 463 - RNA, 23 nt, synthetic construct
  misc_feature 1..23: note = Pt1519antisense
  source 1..23: mol_type = other RNA
gtggatcagtctctgcctcaact

SEQ ID NO: 464 - RNA, 23 nt, synthetic construct
  misc_feature 1..23: note = Pt1520antisense
  source 1..23: mol_type = other RNA
agtggatcagtctctgcctcaac

SEQ ID NO: 465 - RNA, 23 nt, synthetic construct
  misc_feature 1..23: note = Pt1522antisense
  source 1..23: mol_type = other RNA
gaagtggatcagtctctgcctca

SEQ ID NO: 466 - RNA, 23 nt, synthetic construct
  misc_feature 1..23: note = Pt1530antisense
  source 1..23: mol_type = other RNA
ttggcagagaagtggatcagtct

SEQ ID NO: 467 - RNA, 23 nt, synthetic construct
  misc_feature 1..23: note = Pt1532antisense
  source 1..23: mol_type = other RNA
ctttggcagagaagtggatcagt

SEQ ID NO: 468 - RNA, 23 nt, synthetic construct
  misc_feature 1..23: note = Pt1534antisense
  source 1..23: mol_type = other RNA
atctttggcagagaagtggatca

SEQ ID NO: 469 - RNA, 23 nt, synthetic construct
  misc_feature 1..23: note = Pt1535antisense
  source 1..23: mol_type = other RNA
catctttggcagagaagtggatc

SEQ ID NO: 470 - RNA, 23 nt, synthetic construct
  misc_feature 1..23: note = Pt1537antisense
  source 1..23: mol_type = other RNA
gacatctttggcagagaagtgga

SEQ ID NO: 471 - RNA, 23 nt, synthetic construct
  misc_feature 1..23: note = Pt1538antisense
  source 1..23: mol_type = other RNA
tgacatctttggcagagaagtgg

SEQ ID NO: 472 - RNA, 23 nt, synthetic construct
  misc_feature 1..23: note = Pt2102antisense
  source 1..23: mol_type = other RNA
ccttgactttgcattccagacct

SEQ ID NO: 473 - RNA, 23 nt, synthetic construct
  misc_feature 1..23: note = Pt2105antisense
  source 1..23: mol_type = other RNA
gctccttgactttgcattccaga

SEQ ID NO: 474 - RNA, 23 nt, synthetic construct
  misc_feature 1..23: note = Pt2106antisense
  source 1..23: mol_type = other RNA
tgctccttgactttgcattccag

SEQ ID NO: 475 - RNA, 23 nt, synthetic construct
  misc_feature 1..23: note = Pt2113antisense
  source 1..23: mol_type = other RNA
gattccatgctccttgactttgc

SEQ ID NO: 476 - RNA, 23 nt, synthetic construct
  misc_feature 1..23: note = Pt2115antisense
  source 1..23: mol_type = other RNA
gggattccatgctccttgacttt

SEQ ID NO: 477 - RNA, 23 nt, synthetic construct
  misc_feature 1..23: note = Pt2426antisense
  source 1..23: mol_type = other RNA
agagggacaagtcggaaccattt

SEQ ID NO: 478 - RNA, 23 nt, synthetic construct
  misc_feature 1..23: note = Pt2427antisense
  source 1..23: mol_type = other RNA
gagagggacaagtcggaaccatt

SEQ ID NO: 479 - RNA, 23 nt, synthetic construct
  misc_feature 1..23: note = Pt2432antisense
  source 1..23: mol_type = other RNA
gctgagagagggacaagtcggaa

SEQ ID NO: 480 - RNA, 23 nt, synthetic construct
  misc_feature 1..23: note = Pt2530antisense
  source 1..23: mol_type = other RNA
agtgagttccaggcaaggaggct

SEQ ID NO: 481 - RNA, 23 nt, synthetic construct
  misc_feature 1..23: note = Pt2532antisense
  source 1..23: mol_type = other RNA
tgagtgagttccaggcaaggagg

SEQ ID NO: 482 - RNA, 23 nt, synthetic construct
  misc_feature 1..23: note = Pt2533antisense
  source 1..23: mol_type = other RNA
gtgagtgagttccaggcaaggag

SEQ ID NO: 483 - RNA, 23 nt, synthetic construct
  misc_feature 1..23: note = Pt2534antisense
  source 1..23: mol_type = other RNA
agtgagtgagttccaggcaagga

SEQ ID NO: 484 - RNA, 23 nt, synthetic construct
  misc_feature 1..23: note = Pt2535antisense
  source 1..23: mol_type = other RNA
gagtgagtgagttccaggcaagg

SEQ ID NO: 485 - RNA, 23 nt, synthetic construct
  misc_feature 1..23: note = Pt2536antisense
  source 1..23: mol_type = other RNA
agagtgagtgagttccaggcaag

SEQ ID NO: 486 - RNA, 23 nt, synthetic construct
  misc_feature 1..23: note = Pt2538antisense
  source 1..23: mol_type = other RNA
ccagagtgagtgagttccaggca

SEQ ID NO: 487 - RNA, 23 nt, synthetic construct
  misc_feature 1..23: note = Pt2540antisense
  source 1..23: mol_type = other RNA
acccagagtgagtgagttccagg

SEQ ID NO: 488 - RNA, 23 nt, synthetic construct
  misc_feature 1..23: note = Pt2541antisense
  source 1..23: mol_type = other RNA
cacccagagtgagtgagttccag

SEQ ID NO: 489 - RNA, 23 nt, synthetic construct
  misc_feature 1..23: note = Pt2542antisense
  source 1..23: mol_type = other RNA
gcacccagagtgagtgagttcca

SEQ ID NO: 490 - RNA, 23 nt, synthetic construct
  misc_feature 1..23: note = Pt2544antisense
  source 1..23: mol_type = other RNA
aggcacccagagtgagtgagttc

SEQ ID NO: 491 - RNA, 23 nt, synthetic construct
  misc_feature 1..23: note = Pt2545antisense
  source 1..23: mol_type = other RNA
gaggcacccagagtgagtgagtt

SEQ ID NO: 492 - RNA, 23 nt, synthetic construct
  misc_feature 1..23: note = Pt2611antisense
  source 1..23: mol_type = other RNA
acctgtttgaatggtgaaatgcc

SEQ ID NO: 493 - RNA, 23 nt, synthetic construct
  misc_feature 1..23: note = Pt2612antisense
  source 1..23: mol_type = other RNA
gacctgtttgaatggtgaaatgc

SEQ ID NO: 494 - RNA, 23 nt, synthetic construct
  misc_feature 1..23: note = Pt2613antisense
  source 1..23: mol_type = other RNA
cgacctgtttgaatggtgaaatg

SEQ ID NO: 495 - RNA, 23 nt, synthetic construct
  misc_feature 1..23: note = Pt2614antisense
  source 1..23: mol_type = other RNA
tcgacctgtttgaatggtgaaat

SEQ ID NO: 496 - RNA, 23 nt, synthetic construct
  misc_feature 1..23: note = Pt2615antisense
  source 1..23: mol_type = other RNA
ctcgacctgtttgaatggtgaaa

SEQ ID NO: 497 - RNA, 23 nt, synthetic construct
  misc_feature 1..23: note = Pt2616antisense
  source 1..23: mol_type = other RNA
gctcgacctgtttgaatggtgaa

SEQ ID NO: 498 - RNA, 23 nt, synthetic construct
  misc_feature 1..23: note = Pt2618antisense
  source 1..23: mol_type = other RNA
cagctcgacctgtttgaatggtg

SEQ ID NO: 499 - RNA, 23 nt, synthetic construct
  misc_feature 1..23: note = Pt2656antisense
  source 1..23: mol_type = other RNA
acatcggcacattgggagcagct

SEQ ID NO: 500 - RNA, 23 nt, synthetic construct
  misc_feature 1..23: note = Pt2673antisense
  source 1..23: mol_type = other RNA
agtcattctgcccacggacatcg

SEQ ID NO: 501 - RNA, 23 nt, synthetic construct
  misc_feature 1..23: note = Pt2675antisense
  source 1..23: mol_type = other RNA
aaagtcattctgcccacggacat

SEQ ID NO: 502 - RNA, 23 nt, synthetic construct
  misc_feature 1..23: note = Pt2696antisense
  source 1..23: mol_type = other RNA
gcacggaacaagagctcaataaa

SEQ ID NO: 503 - RNA, 23 nt, synthetic construct
  misc_feature 1..23: note = Pt2697antisense
  source 1..23: mol_type = other RNA
ggcacggaacaagagctcaataa

SEQ ID NO: 504 - RNA, 23 nt, synthetic construct
  misc_feature 1..23: note = Pt2698antisense
  source 1..23: mol_type = other RNA
tggcacggaacaagagctcaata

SEQ ID NO: 505 - RNA, 23 nt, synthetic construct
  misc_feature 1..23: note = Pt2699antisense
  source 1..23: mol_type = other RNA
ctggcacggaacaagagctcaat

SEQ ID NO: 506 - RNA, 23 nt, synthetic construct
  misc_feature 1..23: note = Pt2700antisense
  source 1..23: mol_type = other RNA
cctggcacggaacaagagctcaa

SEQ ID NO: 507 - RNA, 23 nt, synthetic construct
  misc_feature 1..23: note = Pt2717antisense
  source 1..23: mol_type = other RNA
gacctgaggattgaatgcctggc

SEQ ID NO: 508 - RNA, 23 nt, synthetic construct
  misc_feature 1..23: note = Pt2718antisense
  source 1..23: mol_type = other RNA
agacctgaggattgaatgcctgg

SEQ ID NO: 509 - RNA, 23 nt, synthetic construct
  misc_feature 1..23: note = Pt2720antisense
  source 1..23: mol_type = other RNA
ggagacctgaggattgaatgcct

SEQ ID NO: 510 - RNA, 23 nt, synthetic construct
  misc_feature 1..23: note = Pt2722antisense
  source 1..23: mol_type = other RNA
gtggagacctgaggattgaatgc

SEQ ID NO: 511 - RNA, 23 nt, synthetic construct
  misc_feature 1..23: note = Pt2724antisense
  source 1..23: mol_type = other RNA
tggtggagacctgaggattgaat

SEQ ID NO: 512 - RNA, 23 nt, synthetic construct
  misc_feature 1..23: note = Pt2726antisense
  source 1..23: mol_type = other RNA
cttggtggagacctgaggattga

SEQ ID NO: 513 - RNA, 23 nt, synthetic construct
  misc_feature 1..23: note = Pt2727antisense
  source 1..23: mol_type = other RNA
ccttggtggagacctgaggattg

SEQ ID NO: 514 - RNA, 23 nt, synthetic construct
  misc_feature 1..23: note = Pt2741antisense
  source 1..23: mol_type = other RNA
gaagaatcctgcctccttggtgg

SEQ ID NO: 515 - RNA, 23 nt, synthetic construct
  misc_feature 1..23: note = Pt2742antisense
  source 1..23: mol_type = other RNA
ggaagaatcctgcctccttggtg

SEQ ID NO: 516 - RNA, 23 nt, synthetic construct
  misc_feature 1..23: note = Pt2743antisense
  source 1..23: mol_type = other RNA
gggaagaatcctgcctccttggt

SEQ ID NO: 517 - RNA, 23 nt, synthetic construct
  misc_feature 1..23: note = Pt2744antisense
  source 1..23: mol_type = other RNA
tgggaagaatcctgcctccttgg

SEQ ID NO: 518 - RNA, 23 nt, synthetic construct
  misc_feature 1..23: note = Pt2745antisense
  source 1..23: mol_type = other RNA
atgggaagaatcctgcctccttg

SEQ ID NO: 519 - RNA, 23 nt, synthetic construct
  misc_feature 1..23: note = Pt2746antisense
  source 1..23: mol_type = other RNA
catgggaagaatcctgcctcctt

SEQ ID NO: 520 - RNA, 23 nt, synthetic construct
  misc_feature 1..23: note = Pt2747antisense
  source 1..23: mol_type = other RNA
ccatgggaagaatcctgcctcct

SEQ ID NO: 521 - RNA, 23 nt, synthetic construct
  misc_feature 1..23: note = Pt2748antisense
  source 1..23: mol_type = other RNA
tccatgggaagaatcctgcctcc

SEQ ID NO: 522 - RNA, 23 nt, synthetic construct
  misc_feature 1..23: note = Pt2750antisense
  source 1..23: mol_type = other RNA
tatccatgggaagaatcctgcct

SEQ ID NO: 523 - RNA, 23 nt, synthetic construct
  misc_feature 1..23: note = Pt2752antisense
  source 1..23: mol_type = other RNA
cctatccatgggaagaatcctgc

SEQ ID NO: 524 - RNA, 23 nt, synthetic construct
  misc_feature 1..23: note = Pt2753antisense
  source 1..23: mol_type = other RNA
ccctatccatgggaagaatcctg

SEQ ID NO: 525 - RNA, 23 nt, synthetic construct
  misc_feature 1..23: note = Pt2789antisense
  source 1..23: mol_type = other RNA
aacgatgtttgtccctgcagccc

SEQ ID NO: 526 - RNA, 23 nt, synthetic construct
  misc_feature 1..23: note = Pt2790antisense
  source 1..23: mol_type = other RNA
caacgatgtttgtccctgcagcc

SEQ ID NO: 527 - RNA, 23 nt, synthetic construct
  misc_feature 1..23: note = Pt2791antisense
  source 1..23: mol_type = other RNA
ccaacgatgtttgtccctgcagc

SEQ ID NO: 528 - RNA, 23 nt, synthetic construct
  misc_feature 1..23: note = Pt2792antisense
  source 1..23: mol_type = other RNA
cccaacgatgtttgtccctgcag

SEQ ID NO: 529 - RNA, 23 nt, synthetic construct
  misc_feature 1..23: note = Pt2815antisense
  source 1..23: mol_type = other RNA
atcagcacctttcacactcaccc

SEQ ID NO: 530 - RNA, 23 nt, synthetic construct
  misc_feature 1..23: note = Pt2816antisense
  source 1..23: mol_type = other RNA
catcagcacctttcacactcacc

SEQ ID NO: 531 - RNA, 23 nt, synthetic construct
  misc_feature 1..23: note = Pt2818antisense
  source 1..23: mol_type = other RNA
gccatcagcacctttcacactca

SEQ ID NO: 532 - RNA, 23 nt, synthetic construct
  misc_feature 1..23: note = Pt2819antisense
  source 1..23: mol_type = other RNA
ggccatcagcacctttcacactc

SEQ ID NO: 533 - RNA, 23 nt, synthetic construct
  misc_feature 1..23: note = Pt2820antisense
  source 1..23: mol_type = other RNA
gggccatcagcacctttcacact

SEQ ID NO: 534 - RNA, 23 nt, synthetic construct
  misc_feature 1..23: note = Pt2821antisense
  source 1..23: mol_type = other RNA
agggccatcagcacctttcacac

SEQ ID NO: 535 - RNA, 23 nt, synthetic construct
  misc_feature 1..23: note = Pt2822antisense
  source 1..23: mol_type = other RNA
gagggccatcagcacctttcaca

SEQ ID NO: 536 - RNA, 23 nt, synthetic construct
  misc_feature 1..23: note = Pt2823antisense
  source 1..23: mol_type = other RNA
tgagggccatcagcacctttcac

SEQ ID NO: 537 - RNA, 23 nt, synthetic construct
  misc_feature 1..23: note = Pt2837antisense
  source 1..23: mol_type = other RNA
cagttagctggagatgagggcca

SEQ ID NO: 538 - RNA, 23 nt, synthetic construct
  misc_feature 1..23: note = Pt2838antisense
  source 1..23: mol_type = other RNA
acagttagctggagatgagggcc

SEQ ID NO: 539 - RNA, 23 nt, synthetic construct
  misc_feature 1..23: note = Pt2839antisense
  source 1..23: mol_type = other RNA
cacagttagctggagatgagggc

SEQ ID NO: 540 - RNA, 23 nt, synthetic construct
  misc_feature 1..23: note = Pt2840antisense
  source 1..23: mol_type = other RNA
ccacagttagctggagatgaggg

SEQ ID NO: 541 - RNA, 23 nt, synthetic construct
  misc_feature 1..23: note = Pt2850antisense
  source 1..23: mol_type = other RNA
aggggcttctccacagttagctg

SEQ ID NO: 542 - RNA, 23 nt, synthetic construct
  misc_feature 1..23: note = Pt2851antisense
  source 1..23: mol_type = other RNA
caggggcttctccacagttagct

SEQ ID NO: 543 - RNA, 23 nt, synthetic construct
  misc_feature 1..23: note = Pt2879antisense
  source 1..23: mol_type = other RNA
gctaagcctccattaatcaggga

SEQ ID NO: 544 - RNA, 23 nt, synthetic construct
  misc_feature 1..23: note = Pt2881antisense
  source 1..23: mol_type = other RNA
aagctaagcctccattaatcagg

SEQ ID NO: 545 - RNA, 23 nt, synthetic construct
  misc_feature 1..23: note = Pt2882antisense
  source 1..23: mol_type = other RNA
aaagctaagcctccattaatcag

SEQ ID NO: 546 - RNA, 23 nt, synthetic construct
  misc_feature 1..23: note = Pt2883antisense
  source 1..23: mol_type = other RNA
gaaagctaagcctccattaatca

SEQ ID NO: 547 - RNA, 23 nt, synthetic construct
  misc_feature 1..23: note = Pt2885antisense
  source 1..23: mol_type = other RNA
cagaaagctaagcctccattaat

SEQ ID NO: 548 - RNA, 23 nt, synthetic construct
  misc_feature 1..23: note = Pt2886antisense
  source 1..23: mol_type = other RNA
ccagaaagctaagcctccattaa

SEQ ID NO: 549 - RNA, 23 nt, synthetic construct
  misc_feature 1..23: note = Pt2887antisense
  source 1..23: mol_type = other RNA
tccagaaagctaagcctccatta

SEQ ID NO: 550 - RNA, 23 nt, synthetic construct
  misc_feature 1..23: note = Pt2888antisense
  source 1..23: mol_type = other RNA
atccagaaagctaagcctccatt

SEQ ID NO: 551 - RNA, 23 nt, synthetic construct
  misc_feature 1..23: note = Pt2889antisense
  source 1..23: mol_type = other RNA
catccagaaagctaagcctccat

SEQ ID NO: 552 - RNA, 23 nt, synthetic construct
  misc_feature 1..23: note = Pt2890antisense
  source 1..23: mol_type = other RNA
ccatccagaaagctaagcctcca

SEQ ID NO: 553 - RNA, 23 nt, synthetic construct
  misc_feature 1..23: note = Pt2891antisense
  source 1..23: mol_type = other RNA
gccatccagaaagctaagcctcc

SEQ ID NO: 554 - RNA, 23 nt, synthetic construct
  misc_feature 1..23: note = Pt2893antisense
  source 1..23: mol_type = other RNA
atgccatccagaaagctaagcct

SEQ ID NO: 555 - RNA, 23 nt, synthetic construct
  misc_feature 1..23: note = Pt2959antisense
  source 1..23: mol_type = other RNA
tggctcaggaaaccaaggcacag

SEQ ID NO: 556 - RNA, 23 nt, synthetic construct
  misc_feature 1..23: note = Pt2960antisense
  source 1..23: mol_type = other RNA
gtggctcaggaaaccaaggcaca

SEQ ID NO: 557 - RNA, 23 nt, synthetic construct
  misc_feature 1..23: note = Pt2962antisense
  source 1..23: mol_type = other RNA
aggtggctcaggaaaccaaggca

SEQ ID NO: 558 - RNA, 23 nt, synthetic construct
  misc_feature 1..23: note = Pt2963antisense
  source 1..23: mol_type = other RNA
aaggtggctcaggaaaccaaggc

SEQ ID NO: 559 - RNA, 23 nt, synthetic construct
  misc_feature 1..23: note = Pt2964antisense
  source 1..23: mol_type = other RNA
aaaggtggctcaggaaaccaagg

SEQ ID NO: 560 - RNA, 23 nt, synthetic construct
  misc_feature 1..23: note = Pt2965antisense
  source 1..23: mol_type = other RNA
taaaggtggctcaggaaaccaag

SEQ ID NO: 561 - RNA, 23 nt, synthetic construct
  misc_feature 1..23: note = Pt2966antisense
  source 1..23: mol_type = other RNA
gtaaaggtggctcaggaaaccaa

SEQ ID NO: 562 - RNA, 23 nt, synthetic construct
  misc_feature 1..23: note = Pt2967antisense
  source 1..23: mol_type = other RNA
agtaaaggtggctcaggaaacca

SEQ ID NO: 563 - RNA, 23 nt, synthetic construct
  misc_feature 1..23: note = Pt2968antisense
  source 1..23: mol_type = other RNA
gagtaaaggtggctcaggaaacc

SEQ ID NO: 564 - RNA, 23 nt, synthetic construct
  misc_feature 1..23: note = Pt2969antisense
  source 1..23: mol_type = other RNA
agagtaaaggtggctcaggaaac

SEQ ID NO: 565 - RNA, 23 nt, synthetic construct
  misc_feature 1..23: note = Pt2970antisense
  source 1..23: mol_type = other RNA
cagagtaaaggtggctcaggaaa

SEQ ID NO: 566 - RNA, 23 nt, synthetic construct
  misc_feature 1..23: note = Pt2972antisense
  source 1..23: mol_type = other RNA
agcagagtaaaggtggctcagga

SEQ ID NO: 567 - RNA, 23 nt, synthetic construct
  misc_feature 1..23: note = Pt2977antisense
  source 1..23: mol_type = other RNA
catagagcagagtaaaggtggct

SEQ ID NO: 568 - RNA, 23 nt, synthetic construct
  misc_feature 1..23: note = Pt2979antisense
  source 1..23: mol_type = other RNA
ggcatagagcagagtaaaggtgg

SEQ ID NO: 569 - RNA, 23 nt, synthetic construct
  misc_feature 1..23: note = Pt2980antisense
  source 1..23: mol_type = other RNA
tggcatagagcagagtaaaggtg

SEQ ID NO: 570 - RNA, 23 nt, synthetic construct
  misc_feature 1..23: note = Pt2981antisense
  source 1..23: mol_type = other RNA
ctggcatagagcagagtaaaggt

SEQ ID NO: 571 - RNA, 23 nt, synthetic construct
  misc_feature 1..23: note = Pt2982antisense
  source 1..23: mol_type = other RNA
cctggcatagagcagagtaaagg

SEQ ID NO: 572 - RNA, 23 nt, synthetic construct
  misc_feature 1..23: note = Pt2983antisense
  source 1..23: mol_type = other RNA
gcctggcatagagcagagtaaag

SEQ ID NO: 573 - RNA, 23 nt, synthetic construct
  misc_feature 1..23: note = Pt2985antisense
  source 1..23: mol_type = other RNA
cagcctggcatagagcagagtaa

SEQ ID NO: 574 - RNA, 23 nt, synthetic construct
  misc_feature 1..23: note = Pt2987antisense
  source 1..23: mol_type = other RNA
cacagcctggcatagagcagagt

SEQ ID NO: 575 - RNA, 23 nt, synthetic construct
  misc_feature 1..23: note = Pt2989antisense
  source 1..23: mol_type = other RNA
agcacagcctggcatagagcaga

SEQ ID NO: 576 - RNA, 23 nt, synthetic construct
  misc_feature 1..23: note = Pt2990antisense
  source 1..23: mol_type = other RNA
tagcacagcctggcatagagcag

SEQ ID NO: 577 - RNA, 23 nt, synthetic construct
  misc_feature 1..23: note = Pt2991antisense
  source 1..23: mol_type = other RNA
ctagcacagcctggcatagagca

SEQ ID NO: 578 - RNA, 23 nt, synthetic construct
  misc_feature 1..23: note = Pt3037antisense
  source 1..23: mol_type = other RNA
agtcagtcctaggtgatggctcc

SEQ ID NO: 579 - RNA, 23 nt, synthetic construct
  misc_feature 1..23: note = Pt3038antisense
  source 1..23: mol_type = other RNA
gagtcagtcctaggtgatggctc

SEQ ID NO: 580 - RNA, 23 nt, synthetic construct
  misc_feature 1..23: note = Pt3039antisense
  source 1..23: mol_type = other RNA
cgagtcagtcctaggtgatggct

SEQ ID NO: 581 - RNA, 23 nt, synthetic construct
  misc_feature 1..23: note = Pt3042antisense
  source 1..23: mol_type = other RNA
tgccgagtcagtcctaggtgatg

SEQ ID NO: 582 - RNA, 23 nt, synthetic construct
  misc_feature 1..23: note = Pt3043antisense
  source 1..23: mol_type = other RNA
ctgccgagtcagtcctaggtgat

SEQ ID NO: 583 - RNA, 23 nt, synthetic construct
  misc_feature 1..23: note = Pt3125antisense
  source 1..23: mol_type = other RNA
cctctgtgaagtaggggtgcgaa

SEQ ID NO: 584 - RNA, 23 nt, synthetic construct
  misc_feature 1..23: note = Pt3126antisense
  source 1..23: mol_type = other RNA
tcctctgtgaagtaggggtgcga

SEQ ID NO: 585 - RNA, 23 nt, synthetic construct
  misc_feature 1..23: note = Pt3127antisense
  source 1..23: mol_type = other RNA
ttcctctgtgaagtaggggtgcg

SEQ ID NO: 586 - RNA, 23 nt, synthetic construct
  misc_feature 1..23: note = Pt3138antisense
  source 1..23: mol_type = other RNA
ttccaggtttcttcctctgtgaa

SEQ ID NO: 587 - RNA, 23 nt, synthetic construct
  misc_feature 1..23: note = Pt3139antisense
  source 1..23: mol_type = other RNA
gttccaggtttcttcctctgtga

SEQ ID NO: 588 - RNA, 23 nt, synthetic construct
  misc_feature 1..23: note = Pt3141antisense
  source 1..23: mol_type = other RNA
tggttccaggtttcttcctctgt

SEQ ID NO: 589 - RNA, 23 nt, synthetic construct
  misc_feature 1..23: note = Pt3177antisense
  source 1..23: mol_type = other RNA
gttcctgctgtgtgagcttggca

SEQ ID NO: 590 - RNA, 23 nt, synthetic construct
  misc_feature 1..23: note = Pt3178antisense
  source 1..23: mol_type = other RNA
agttcctgctgtgtgagcttggc

SEQ ID NO: 591 - RNA, 23 nt, synthetic construct
  misc_feature 1..23: note = Pt3179antisense
  source 1..23: mol_type = other RNA
cagttcctgctgtgtgagcttgg

SEQ ID NO: 592 - RNA, 23 nt, synthetic construct
  misc_feature 1..23: note = Pt3180antisense
  source 1..23: mol_type = other RNA
tcagttcctgctgtgtgagcttg

SEQ ID NO: 593 - RNA, 23 nt, synthetic construct
  misc_feature 1..23: note = Pt3185antisense
  source 1..23: mol_type = other RNA
ctggctcagttcctgctgtgtga

SEQ ID NO: 594 - RNA, 23 nt, synthetic construct
  misc_feature 1..23: note = Pt3186antisense
  source 1..23: mol_type = other RNA
tctggctcagttcctgctgtgtg

SEQ ID NO: 595 - RNA, 23 nt, synthetic construct
  misc_feature 1..23: note = Pt3187antisense
  source 1..23: mol_type = other RNA
ttctggctcagttcctgctgtgt

SEQ ID NO: 596 - RNA, 23 nt, synthetic construct
  misc_feature 1..23: note = Pt3188antisense
  source 1..23: mol_type = other RNA
tttctggctcagttcctgctgtg

SEQ ID NO: 597 - RNA, 23 nt, synthetic construct
  misc_feature 1..23: note = Pt3189antisense
  source 1..23: mol_type = other RNA
gtttctggctcagttcctgctgt

SEQ ID NO: 598 - RNA, 23 nt, synthetic construct
  misc_feature 1..23: note = Pt3190antisense
  source 1..23: mol_type = other RNA
cgtttctggctcagttcctgctg

SEQ ID NO: 599 - RNA, 23 nt, synthetic construct
  misc_feature 1..23: note = Pt3191antisense
  source 1..23: mol_type = other RNA
gcgtttctggctcagttcctgct

SEQ ID NO: 600 - RNA, 23 nt, synthetic construct
  misc_feature 1..23: note = Pt3192antisense
  source 1..23: mol_type = other RNA
tgcgtttctggctcagttcctgc

SEQ ID NO: 601 - RNA, 23 nt, synthetic construct
  misc_feature 1..23: note = Pt3193antisense
  source 1..23: mol_type = other RNA
ctgcgtttctggctcagttcctg

SEQ ID NO: 602 - RNA, 23 nt, synthetic construct
  misc_feature 1..23: note = Pt3194antisense
  source 1..23: mol_type = other RNA
tctgcgtttctggctcagttcct

SEQ ID NO: 603 - RNA, 23 nt, synthetic construct
  misc_feature 1..23: note = Pt3199antisense
  source 1..23: mol_type = other RNA
cccaatctgcgtttctggctcag

SEQ ID NO: 604 - RNA, 23 nt, synthetic construct
  misc_feature 1..23: note = Pt3200antisense
  source 1..23: mol_type = other RNA
gcccaatctgcgtttctggctca

SEQ ID NO: 605 - RNA, 23 nt, synthetic construct
  misc_feature 1..23: note = Pt3205antisense
  source 1..23: mol_type = other RNA
agccagcccaatctgcgtttctg

SEQ ID NO: 606 - RNA, 23 nt, synthetic construct
  misc_feature 1..23: note = Pt3206antisense
  source 1..23: mol_type = other RNA
gagccagcccaatctgcgtttct

SEQ ID NO: 607 - RNA, 23 nt, synthetic construct
  misc_feature 1..23: note = Pt3207antisense
  source 1..23: mol_type = other RNA
agagccagcccaatctgcgtttc

SEQ ID NO: 608 - RNA, 23 nt, synthetic construct
  misc_feature 1..23: note = Pt3234antisense
  source 1..23: mol_type = other RNA
gggtgaagtaagaagaggcttgg

SEQ ID NO: 609 - RNA, 23 nt, synthetic construct
  misc_feature 1..23: note = Pt3235antisense
  source 1..23: mol_type = other RNA
cgggtgaagtaagaagaggcttg

SEQ ID NO: 610 - RNA, 23 nt, synthetic construct
  misc_feature 1..23: note = Pt3236antisense
  source 1..23: mol_type = other RNA
ccgggtgaagtaagaagaggctt

SEQ ID NO: 611 - RNA, 23 nt, synthetic construct
  misc_feature 1..23: note = Pt3237antisense
  source 1..23: mol_type = other RNA
gccgggtgaagtaagaagaggct

SEQ ID NO: 612 - RNA, 23 nt, synthetic construct
  misc_feature 1..23: note = Pt3238antisense
  source 1..23: mol_type = other RNA
agccgggtgaagtaagaagaggc

SEQ ID NO: 613 - RNA, 23 nt, synthetic construct
  misc_feature 1..23: note = Pt3239antisense
  source 1..23: mol_type = other RNA
cagccgggtgaagtaagaagagg

SEQ ID NO: 614 - RNA, 23 nt, synthetic construct
  misc_feature 1..23: note = Pt3240antisense
  source 1..23: mol_type = other RNA
ccagccgggtgaagtaagaagag

SEQ ID NO: 615 - RNA, 23 nt, synthetic construct
  misc_feature 1..23: note = Pt3241antisense
  source 1..23: mol_type = other RNA
cccagccgggtgaagtaagaaga

SEQ ID NO: 616 - RNA, 23 nt, synthetic construct
  misc_feature 1..23: note = Pt3243antisense
  source 1..23: mol_type = other RNA
agcccagccgggtgaagtaagaa

SEQ ID NO: 617 - RNA, 23 nt, synthetic construct
  misc_feature 1..23: note = Pt3275antisense
  source 1..23: mol_type = other RNA
tcccagcctcactgttacccgta

SEQ ID NO: 618 - RNA, 23 nt, synthetic construct
  misc_feature 1..23: note = Pt3276antisense
  source 1..23: mol_type = other RNA
ttcccagcctcactgttacccgt

SEQ ID NO: 619 - RNA, 23 nt, synthetic construct
  misc_feature 1..23: note = Pt3302antisense
  source 1..23: mol_type = other RNA
accgagcttcctggtctgtgttc

SEQ ID NO: 620 - RNA, 23 nt, synthetic construct
  misc_feature 1..23: note = Pt3303antisense
  source 1..23: mol_type = other RNA
caccgagcttcctggtctgtgtt

SEQ ID NO: 621 - RNA, 23 nt, synthetic construct
  misc_feature 1..23: note = Pt3304antisense
  source 1..23: mol_type = other RNA
tcaccgagcttcctggtctgtgt

SEQ ID NO: 622 - RNA, 23 nt, synthetic construct
  misc_feature 1..23: note = Pt3306antisense
  source 1..23: mol_type = other RNA
actcaccgagcttcctggtctgt

SEQ ID NO: 623 - RNA, 23 nt, synthetic construct
  misc_feature 1..23: note = Pt3308antisense
  source 1..23: mol_type = other RNA
tcactcaccgagcttcctggtct

SEQ ID NO: 624 - RNA, 23 nt, synthetic construct
  misc_feature 1..23: note = Pt3309antisense
  source 1..23: mol_type = other RNA
atcactcaccgagcttcctggtc

SEQ ID NO: 625 - RNA, 23 nt, synthetic construct
  misc_feature 1..23: note = Pt3310antisense
  source 1..23: mol_type = other RNA
catcactcaccgagcttcctggt

SEQ ID NO: 626 - RNA, 23 nt, synthetic construct
  misc_feature 1..23: note = Pt3313antisense
  source 1..23: mol_type = other RNA
tgccatcactcaccgagcttcct

SEQ ID NO: 627 - RNA, 23 nt, synthetic construct
  misc_feature 1..23: note = Pt3315antisense
  source 1..23: mol_type = other RNA
tctgccatcactcaccgagcttc

SEQ ID NO: 628 - RNA, 23 nt, synthetic construct
  misc_feature 1..23: note = Pt3317antisense
  source 1..23: mol_type = other RNA
gttctgccatcactcaccgagct

SEQ ID NO: 629 - RNA, 23 nt, synthetic construct
  misc_feature 1..23: note = Pt3319antisense
  source 1..23: mol_type = other RNA
tcgttctgccatcactcaccgag

SEQ ID NO: 630 - RNA, 23 nt, synthetic construct
  misc_feature 1..23: note = Pt3321antisense
  source 1..23: mol_type = other RNA
catcgttctgccatcactcaccg

SEQ ID NO: 631 - RNA, 23 nt, synthetic construct
  misc_feature 1..23: note = Pt3322antisense
  source 1..23: mol_type = other RNA
gcatcgttctgccatcactcacc

SEQ ID NO: 632 - RNA, 23 nt, synthetic construct
  misc_feature 1..23: note = Pt3382antisense
  source 1..23: mol_type = other RNA
atctccgccaggccagtgaatca

SEQ ID NO: 633 - RNA, 23 nt, synthetic construct
  misc_feature 1..23: note = Pt3390antisense
  source 1..23: mol_type = other RNA
ttagaagcatctccgccaggcca

SEQ ID NO: 634 - RNA, 23 nt, synthetic construct
  misc_feature 1..23: note = Pt3394antisense
  source 1..23: mol_type = other RNA
tgccttagaagcatctccgccag

SEQ ID NO: 635 - RNA, 23 nt, synthetic construct
  misc_feature 1..23: note = Pt3431antisense
  source 1..23: mol_type = other RNA
tcaaggagggacagttgttggcc

SEQ ID NO: 636 - RNA, 23 nt, synthetic construct
  misc_feature 1..23: note = Pt3432antisense
  source 1..23: mol_type = other RNA
ctcaaggagggacagttgttggc

SEQ ID NO: 637 - RNA, 23 nt, synthetic construct
  misc_feature 1..23: note = Pt3433antisense
  source 1..23: mol_type = other RNA
gctcaaggagggacagttgttgg

SEQ ID NO: 638 - RNA, 23 nt, synthetic construct
  misc_feature 1..23: note = Pt3434antisense
  source 1..23: mol_type = other RNA
tgctcaaggagggacagttgttg

SEQ ID NO: 639 - RNA, 23 nt, synthetic construct
  misc_feature 1..23: note = Pt3435antisense
  source 1..23: mol_type = other RNA
gtgctcaaggagggacagttgtt

SEQ ID NO: 640 - RNA, 23 nt, synthetic construct
  misc_feature 1..23: note = Pt3436antisense
  source 1..23: mol_type = other RNA
ggtgctcaaggagggacagttgt

SEQ ID NO: 641 - RNA, 23 nt, synthetic construct
  misc_feature 1..23: note = Pt3437antisense
  source 1..23: mol_type = other RNA
tggtgctcaaggagggacagttg

SEQ ID NO: 642 - RNA, 23 nt, synthetic construct
  misc_feature 1..23: note = Pt3438antisense
  source 1..23: mol_type = other RNA
ctggtgctcaaggagggacagtt

SEQ ID NO: 643 - RNA, 23 nt, synthetic construct
  misc_feature 1..23: note = Pt3461antisense
  source 1..23: mol_type = other RNA
aatgtctgcttgcttgggtgggg

SEQ ID NO: 644 - RNA, 23 nt, synthetic construct
  misc_feature 1..23: note = Pt3465antisense
  source 1..23: mol_type = other RNA
gataaatgtctgcttgcttgggt

SEQ ID NO: 645 - RNA, 23 nt, synthetic construct
  misc_feature 1..23: note = Pt3468antisense
  source 1..23: mol_type = other RNA
aaagataaatgtctgcttgcttg

SEQ ID NO: 646 - RNA, 23 nt, synthetic construct
  misc_feature 1..23: note = Pt3490antisense
  source 1..23: mol_type = other RNA
ggcaacagagaggacagacccaa

SEQ ID NO: 647 - RNA, 23 nt, synthetic construct
  misc_feature 1..23: note = Pt3491antisense
  source 1..23: mol_type = other RNA
aggcaacagagaggacagaccca

SEQ ID NO: 648 - RNA, 23 nt, synthetic construct
  misc_feature 1..23: note = Pt3492antisense
  source 1..23: mol_type = other RNA
aaggcaacagagaggacagaccc

SEQ ID NO: 649 - RNA, 23 nt, synthetic construct
  misc_feature 1..23: note = Pt3493antisense
  source 1..23: mol_type = other RNA
aaaggcaacagagaggacagacc

SEQ ID NO: 650 - RNA, 23 nt, synthetic construct
  misc_feature 1..23: note = Pt3552antisense
  source 1..23: mol_type = other RNA
cccagaataaatatcttcaagtt

SEQ ID NO: 651 - RNA, 23 nt, synthetic construct
  misc_feature 1..23: note = Pt3553antisense
  source 1..23: mol_type = other RNA
acccagaataaatatcttcaagt

SEQ ID NO: 652 - RNA, 23 nt, synthetic construct
  misc_feature 1..23: note = PPC1antisense
  source 1..23: mol_type = other RNA
caagttacaaaagcaaaacaggt

SEQ ID NO: 653 - RNA, 23 nt, synthetic construct
  misc_feature 1..23: note = PPC2antisense
  source 1..23: mol_type = other RNA
acaaaagcaaaacaggtctagaa

SEQ ID NO: 654 - RNA, 21 nt, synthetic construct
  misc_feature 1..21: note = P341-2antisense
  source 1..21: mol_type = other RNA
  modified_base 20..21: mod_base = OTHER; note = thymine
aaacaggtctagaaaagtttt

SEQ ID NO: 655 - RNA, 23 nt, Homo sapiens
  source 1..23: mol_type = other RNA
aacttcagctcctgcacagtcct

SEQ ID NO: 656 - RNA, 23 nt, Homo sapiens
  source 1..23: mol_type = other RNA
atggttccgacttgtccctctct

SEQ ID NO: 657 - RNA, 23 nt, Homo sapiens
  source 1..23: mol_type = other RNA
ttgcctggaactcactcactctg

SEQ ID NO: 658 - RNA, 23 nt, Homo sapiens
  source 1..23: mol_type = other RNA
gggcatttcaccattcaaacagg

SEQ ID NO: 659 - RNA, 23 nt, Homo sapiens
  source 1..23: mol_type = other RNA
tcaccattcaaacaggtcgagct

SEQ ID NO: 660 - RNA, 23 nt, Homo sapiens
  source 1..23: mol_type = other RNA
gatgtccgtgggcagaatgactt

SEQ ID NO: 661 - RNA, 23 nt, Homo sapiens
  source 1..23: mol_type = other RNA
gggcagaatgacttttattgagc

SEQ ID NO: 662 - RNA, 23 nt, Homo sapiens
  source 1..23: mol_type = other RNA
caggcattcaatcctcaggtctc

SEQ ID NO: 663 - RNA, 23 nt, Homo sapiens
  source 1..23: mol_type = other RNA
ggcattcaatcctcaggtctcca

SEQ ID NO: 664 - RNA, 23 nt, Homo sapiens
  source 1..23: mol_type = other RNA
cattcaatcctcaggtctccacc

SEQ ID NO: 665 - RNA, 23 nt, Homo sapiens
  source 1..23: mol_type = other RNA
ttcaatcctcaggtctccaccaa

SEQ ID NO: 666 - RNA, 23 nt, Homo sapiens
  source 1..23: mol_type = other RNA
tccaccaaggaggcaggattctt

SEQ ID NO: 667 - RNA, 23 nt, Homo sapiens
  source 1..23: mol_type = other RNA
gaggcaggattcttcccatggat

SEQ ID NO: 668 - RNA, 23 nt, Homo sapiens
  source 1..23: mol_type = other RNA
ggcaggattcttcccatggatag

SEQ ID NO: 669 - RNA, 23 nt, Homo sapiens
  source 1..23: mol_type = other RNA
gtgagtgtgaaaggtgctgatgg

SEQ ID NO: 670 - RNA, 23 nt, Homo sapiens
  source 1..23: mol_type = other RNA
tgaaaggtgctgatggccctcat

SEQ ID NO: 671 - RNA, 23 nt, Homo sapiens
  source 1..23: mol_type = other RNA
atggccctcatctccagctaact

SEQ ID NO: 672 - RNA, 23 nt, Homo sapiens
  source 1..23: mol_type = other RNA
ccctgattaatggaggcttagct

SEQ ID NO: 673 - RNA, 23 nt, Homo sapiens
  source 1..23: mol_type = other RNA
gattaatggaggcttagctttct

SEQ ID NO: 674 - RNA, 23 nt, Homo sapiens
  source 1..23: mol_type = other RNA
gaggcttagctttctggatggca

SEQ ID NO: 675 - RNA, 23 nt, Homo sapiens
  source 1..23: mol_type = other RNA
ttcctgagccacctttactctgc

SEQ ID NO: 676 - RNA, 23 nt, Homo sapiens
  source 1..23: mol_type = other RNA
gccacctttactctgctctatgc

SEQ ID NO: 677 - RNA, 23 nt, Homo sapiens
  source 1..23: mol_type = other RNA
tttactctgctctatgccaggct

SEQ ID NO: 678 - RNA, 23 nt, Homo sapiens
  source 1..23: mol_type = other RNA
tactctgctctatgccaggctgt

SEQ ID NO: 679 - RNA, 23 nt, Homo sapiens
  source 1..23: mol_type = other RNA
actcggcagtgtgcagtggtgca

SEQ ID NO: 680 - RNA, 23 nt, Homo sapiens
  source 1..23: mol_type = other RNA
ggtacacattcgcacccctactt

SEQ ID NO: 681 - RNA, 23 nt, Homo sapiens
  source 1..23: mol_type = other RNA
tacacattcgcacccctacttca

SEQ ID NO: 682 - RNA, 23 nt, Homo sapiens
  source 1..23: mol_type = other RNA
acattcgcacccctacttcacag

SEQ ID NO: 683 - RNA, 23 nt, Homo sapiens
  source 1..23: mol_type = other RNA
attcgcacccctacttcacagag

SEQ ID NO: 684 - RNA, 23 nt, Homo sapiens
  source 1..23: mol_type = other RNA
cacccctacttcacagaggaaga

SEQ ID NO: 685 - RNA, 23 nt, Homo sapiens
  source 1..23: mol_type = other RNA
cacagaggaagaaacctggaacc

SEQ ID NO: 686 - RNA, 23 nt, Homo sapiens
  source 1..23: mol_type = other RNA
gaactgagccagaaacgcagatt

SEQ ID NO: 687 - RNA, 23 nt, Homo sapiens
  source 1..23: mol_type = other RNA
actgagccagaaacgcagattgg

SEQ ID NO: 688 - RNA, 23 nt, Homo sapiens
  source 1..23: mol_type = other RNA
gccaagcctcttcttacttcacc

SEQ ID NO: 689 - RNA, 23 nt, Homo sapiens
  source 1..23: mol_type = other RNA
aagctcggtgagtgatggcagaa

SEQ ID NO: 690 - RNA, 23 nt, Homo sapiens
  source 1..23: mol_type = other RNA
tcggtgagtgatggcagaacgat

SEQ ID NO: 691 - RNA, 23 nt, Homo sapiens
  source 1..23: mol_type = other RNA
cacccaagcaagcagacatttat

SEQ ID NO: 692 - RNA, 23 nt, Homo sapiens
  source 1..23: mol_type = other RNA
cccaagcaagcagacatttatct

SEQ ID NO: 693 - RNA, 23 nt, Homo sapiens
  source 1..23: mol_type = other RNA
tttgggtctgtcctctctgttgc

SEQ ID NO: 694 - RNA, 23 nt, Homo sapiens
  source 1..23: mol_type = other RNA
tgcttttgtaacttgaagatatt

SEQ ID NO: 695 - RNA, 23 nt, Homo sapiens
  source 1..23: mol_type = other RNA
ttgtaacttgaagatatttattc

SEQ ID NO: 696 - RNA, 23 nt, Homo sapiens
  source 1..23: mol_type = other RNA
cttgaagatatttattctgggtt

SEQ ID NO: 697 - RNA, 23 nt, Homo sapiens
  source 1..23: mol_type = other RNA
ggccgaagcacccgagcacggaa

SEQ ID NO: 698 - RNA, 23 nt, Homo sapiens
  source 1..23: mol_type = other RNA
ggcacctacgtggtggtgctgaa

SEQ ID NO: 699 - RNA, 23 nt, Homo sapiens
  source 1..23: mol_type = other RNA
gatacctcaccaagatcctgcat

SEQ ID NO: 700 - RNA, 23 nt, Homo sapiens
  source 1..23: mol_type = other RNA
ctcaccaagatcctgcatgtctt

SEQ ID NO: 701 - RNA, 23 nt, Homo sapiens
  source 1..23: mol_type = other RNA
tgtcttccatggccttcttcctg

SEQ ID NO: 702 - RNA, 23 nt, Homo sapiens
  source 1..23: mol_type = other RNA
ttccatggccttcttcctggctt

SEQ ID NO: 703 - RNA, 23 nt, Homo sapiens
  source 1..23: mol_type = other RNA
ttgaagttgccccatgtcgacta

SEQ ID NO: 704 - RNA, 23 nt, Homo sapiens
  source 1..23: mol_type = other RNA
gcctggtggaggtgtatctccta

SEQ ID NO: 705 - RNA, 23 nt, Homo sapiens
  source 1..23: mol_type = other RNA
tgtatctcctagacaccagcata

SEQ ID NO: 706 - RNA, 23 nt, Homo sapiens
  source 1..23: mol_type = other RNA
tctcctagacaccagcatacaga

SEQ ID NO: 707 - RNA, 23 nt, Homo sapiens
  source 1..23: mol_type = other RNA
cctagacaccagcatacagagtg

SEQ ID NO: 708 - RNA, 23 nt, Homo sapiens
  source 1..23: mol_type = other RNA
agacaccagcatacagagtgacc

SEQ ID NO: 709 - RNA, 23 nt, Homo sapiens
  source 1..23: mol_type = other RNA
catacagagtgaccaccgggaaa

SEQ ID NO: 710 - RNA, 23 nt, Homo sapiens
  source 1..23: mol_type = other RNA
ggcagggtcatggtcaccgactt

SEQ ID NO: 711 - RNA, 23 nt, Homo sapiens
  source 1..23: mol_type = other RNA
gtcatggtcaccgacttcgagaa

SEQ ID NO: 712 - RNA, 23 nt, Homo sapiens
  source 1..23: mol_type = other RNA
atggtcaccgacttcgagaatgt

SEQ ID NO: 713 - RNA, 23 nt, Homo sapiens
  source 1..23: mol_type = other RNA
gcacggttagcggcaccctcata

SEQ ID NO: 714 - RNA, 23 nt, Homo sapiens
  source 1..23: mol_type = other RNA
caccctcataggcctggagttta

SEQ ID NO: 715 - RNA, 23 nt, Homo sapiens
  source 1..23: mol_type = other RNA
ccctcataggcctggagtttatt

SEQ ID NO: 716 - RNA, 23 nt, Homo sapiens
  source 1..23: mol_type = other RNA
cataggcctggagtttattcgga

SEQ ID NO: 717 - RNA, 23 nt, Homo sapiens
  source 1..23: mol_type = other RNA
ggtgggtacagccgcgtcctcaa

SEQ ID NO: 718 - RNA, 23 nt, Homo sapiens
  source 1..23: mol_type = other RNA
ttccgggacgatgcctgcctcta

SEQ ID NO: 719 - RNA, 23 nt, Homo sapiens
  source 1..23: mol_type = other RNA
tgcagcacctgctttgtgtcaca

SEQ ID NO: 720 - RNA, 23 nt, Homo sapiens
  source 1..23: mol_type = other RNA
ggccgagttgaggcagagactga

SEQ ID NO: 721 - RNA, 23 nt, Homo sapiens
  source 1..23: mol_type = other RNA
gagttgaggcagagactgatcca

SEQ ID NO: 722 - RNA, 23 nt, Homo sapiens
  source 1..23: mol_type = other RNA
ttgaggcagagactgatccactt

SEQ ID NO: 723 - RNA, 23 nt, Homo sapiens
  source 1..23: mol_type = other RNA
gaggcagagactgatccacttct

SEQ ID NO: 724 - RNA, 23 nt, Homo sapiens
  source 1..23: mol_type = other RNA
gactgatccacttctctgccaaa

SEQ ID NO: 725 - RNA, 23 nt, Homo sapiens
  source 1..23: mol_type = other RNA
ctgatccacttctctgccaaaga

SEQ ID NO: 726 - RNA, 23 nt, Homo sapiens
  source 1..23: mol_type = other RNA
atccacttctctgccaaagatgt

SEQ ID NO: 727 - RNA, 23 nt, Homo sapiens
  source 1..23: mol_type = other RNA
cacttctctgccaaagatgtcat

SEQ ID NO: 728 - RNA, 23 nt, Homo sapiens
  source 1..23: mol_type = other RNA
tgccaaagatgtcatcaatgagg

SEQ ID NO: 729 - RNA, 23 nt, Homo sapiens
  source 1..23: mol_type = other RNA
tgcaggactgtatggtcagcaca

SEQ ID NO: 730 - RNA, 23 nt, Homo sapiens
  source 1..23: mol_type = other RNA
caggactgtatggtcagcacact

SEQ ID NO: 731 - RNA, 23 nt, Homo sapiens
  source 1..23: mol_type = other RNA
caggtctggaatgcaaagtcaag

SEQ ID NO: 732 - RNA, 23 nt, Homo sapiens
  source 1..23: mol_type = other RNA
tgcaaagtcaaggagcatggaat

SEQ ID NO: 733 - RNA, 23 nt, Homo sapiens
  source 1..23: mol_type = other RNA
caaagtcaaggagcatggaatcc

SEQ ID NO: 734 - RNA, 23 nt, Homo sapiens
  source 1..23: mol_type = other RNA
aagtcaaggagcatggaatcccg

SEQ ID NO: 735 - RNA, 23 nt, Homo sapiens
  source 1..23: mol_type = other RNA
gtacacattcgcacccctacttc

SEQ ID NO: 736 - RNA, 23 nt, Homo sapiens
  source 1..23: mol_type = other RNA
acacattcgcacccctacttcac

SEQ ID NO: 737 - RNA, 23 nt, Homo sapiens
  source 1..23: mol_type = other RNA
cacattcgcacccctacttcaca

SEQ ID NO: 738 - RNA, 23 nt, Homo sapiens
  source 1..23: mol_type = other RNA
cattcgcacccctacttcacaga

SEQ ID NO: 739 - RNA, 23 nt, Homo sapiens
  source 1..23: mol_type = other RNA
ggaactgagccagaaacgcagat

SEQ ID NO: 740 - RNA, 23 nt, Homo sapiens
  source 1..23: mol_type = other RNA
aactgagccagaaacgcagattg

SEQ ID NO: 741 - RNA, 23 nt, Homo sapiens
  source 1..23: mol_type = other RNA
aagccaagcctcttcttacttca

SEQ ID NO: 742 - RNA, 23 nt, Homo sapiens
  source 1..23: mol_type = other RNA
agccaagcctcttcttacttcac

SEQ ID NO: 743 - RNA, 23 nt, Homo sapiens
  source 1..23: mol_type = other RNA
aactttttccgttatcacccagg

SEQ ID NO: 744 - RNA, 23 nt, Homo sapiens
  source 1..23: mol_type = other RNA
cccacccaagcaagcagacattt

SEQ ID NO: 745 - RNA, 23 nt, Homo sapiens
  source 1..23: mol_type = other RNA
ccacccaagcaagcagacattta

SEQ ID NO: 746 - RNA, 23 nt, Homo sapiens
  source 1..23: mol_type = other RNA
ccaagcaagcagacatttatctt

SEQ ID NO: 747 - RNA, 23 nt, Homo sapiens
  source 1..23: mol_type = other RNA
gcaagcagacatttatcttttgg

SEQ ID NO: 748 - RNA, 23 nt, Homo sapiens
  source 1..23: mol_type = other RNA
caagcagacatttatcttttggg

SEQ ID NO: 749 - RNA, 23 nt, Homo sapiens
  source 1..23: mol_type = other RNA
tctgtcctctctgttgccttttt

SEQ ID NO: 750 - RNA, 23 nt, Homo sapiens
  source 1..23: mol_type = other RNA
tgtcctctctgttgcctttttac

SEQ ID NO: 751 - RNA, 23 nt, Homo sapiens
  source 1..23: mol_type = other RNA
ttgcctttttacagccaactttt

SEQ ID NO: 752 - RNA, 23 nt, Homo sapiens
  source 1..23: mol_type = other RNA
tttttacagccaacttttctaga

SEQ ID NO: 753 - RNA, 23 nt, Homo sapiens
  source 1..23: mol_type = other RNA
cagccaacttttctagacctgtt

SEQ ID NO: 754 - RNA, 23 nt, Homo sapiens
  source 1..23: mol_type = other RNA
agccaacttttctagacctgttt

SEQ ID NO: 755 - RNA, 23 nt, Homo sapiens
  source 1..23: mol_type = other RNA
gccaacttttctagacctgtttt

SEQ ID NO: 756 - RNA, 23 nt, Homo sapiens
  source 1..23: mol_type = other RNA
ccaacttttctagacctgttttg

SEQ ID NO: 757 - RNA, 23 nt, Homo sapiens
  source 1..23: mol_type = other RNA
caacttttctagacctgttttgc

SEQ ID NO: 758 - RNA, 23 nt, Homo sapiens
  source 1..23: mol_type = other RNA
aacttttctagacctgttttgct

SEQ ID NO: 759 - RNA, 23 nt, Homo sapiens
  source 1..23: mol_type = other RNA
ttttctagacctgttttgctttt

SEQ ID NO: 760 - RNA, 23 nt, Homo sapiens
  source 1..23: mol_type = other RNA
tttctagacctgttttgcttttg

SEQ ID NO: 761 - RNA, 23 nt, Homo sapiens
  source 1..23: mol_type = other RNA
ctagacctgttttgcttttgtaa

SEQ ID NO: 762 - RNA, 23 nt, Homo sapiens
  source 1..23: mol_type = other RNA
atatttattctgggttttgtagc

SEQ ID NO: 763 - RNA, 23 nt, Homo sapiens
  source 1..23: mol_type = other RNA
atacctcaccaagatcctgcatg

SEQ ID NO: 764 - RNA, 23 nt, Homo sapiens
  source 1..23: mol_type = other RNA
tacctcaccaagatcctgcatgt

SEQ ID NO: 765 - RNA, 23 nt, Homo sapiens
  source 1..23: mol_type = other RNA
cttgaagttgccccatgtcgact

SEQ ID NO: 766 - RNA, 23 nt, Homo sapiens
  source 1..23: mol_type = other RNA
tgaagttgccccatgtcgactac

SEQ ID NO: 767 - RNA, 23 nt, Homo sapiens
  source 1..23: mol_type = other RNA
gaagttgccccatgtcgactaca

SEQ ID NO: 768 - RNA, 23 nt, Homo sapiens
  source 1..23: mol_type = other RNA
tatctcctagacaccagcataca

SEQ ID NO: 769 - RNA, 23 nt, Homo sapiens
  source 1..23: mol_type = other RNA
atctcctagacaccagcatacag

SEQ ID NO: 770 - RNA, 23 nt, Homo sapiens
  source 1..23: mol_type = other RNA
ctcctagacaccagcatacagag

SEQ ID NO: 771 - RNA, 23 nt, Homo sapiens
  source 1..23: mol_type = other RNA
tcctagacaccagcatacagagt

SEQ ID NO: 772 - RNA, 23 nt, Homo sapiens
  source 1..23: mol_type = other RNA
tagacaccagcatacagagtgac

SEQ ID NO: 773 - RNA, 23 nt, Homo sapiens
  source 1..23: mol_type = other RNA
acaccagcatacagagtgaccac

SEQ ID NO: 774 - RNA, 23 nt, Homo sapiens
  source 1..23: mol_type = other RNA
caccagcatacagagtgaccacc

SEQ ID NO: 775 - RNA, 23 nt, Homo sapiens
  source 1..23: mol_type = other RNA
atacagagtgaccaccgggaaat

SEQ ID NO: 776 - RNA, 23 nt, Homo sapiens
  source 1..23: mol_type = other RNA
tacagagtgaccaccgggaaatc

SEQ ID NO: 777 - RNA, 23 nt, Homo sapiens
  source 1..23: mol_type = other RNA
tcatggtcaccgacttcgagaat

SEQ ID NO: 778 - RNA, 23 nt, Homo sapiens
  source 1..23: mol_type = other RNA
catggtcaccgacttcgagaatg

SEQ ID NO: 779 - RNA, 23 nt, Homo sapiens
  source 1..23: mol_type = other RNA
tggtcaccgacttcgagaatgtg

SEQ ID NO: 780 - RNA, 23 nt, Homo sapiens
  source 1..23: mol_type = other RNA
cagacaggccagcaagtgtgaca

SEQ ID NO: 781 - RNA, 23 nt, Homo sapiens
  source 1..23: mol_type = other RNA
accctcataggcctggagtttat

SEQ ID NO: 782 - RNA, 23 nt, Homo sapiens
  source 1..23: mol_type = other RNA
cctcataggcctggagtttattc

SEQ ID NO: 783 - RNA, 23 nt, Homo sapiens
  source 1..23: mol_type = other RNA
ctcataggcctggagtttattcg

SEQ ID NO: 784 - RNA, 23 nt, Homo sapiens
  source 1..23: mol_type = other RNA
tcataggcctggagtttattcgg

SEQ ID NO: 785 - RNA, 23 nt, Homo sapiens
  source 1..23: mol_type = other RNA
ataggcctggagtttattcggaa

SEQ ID NO: 786 - RNA, 23 nt, Homo sapiens
  source 1..23: mol_type = other RNA
taggcctggagtttattcggaaa

SEQ ID NO: 787 - RNA, 23 nt, Homo sapiens
  source 1..23: mol_type = other RNA
tcagctcccgaggtcatcacagt

SEQ ID NO: 788 - RNA, 23 nt, Homo sapiens
  source 1..23: mol_type = other RNA
ccgagttgaggcagagactgatc

SEQ ID NO: 789 - RNA, 23 nt, Homo sapiens
  source 1..23: mol_type = other RNA
cgagttgaggcagagactgatcc

SEQ ID NO: 790 - RNA, 23 nt, Homo sapiens
  source 1..23: mol_type = other RNA
agttgaggcagagactgatccac

SEQ ID NO: 791 - RNA, 23 nt, Homo sapiens
  source 1..23: mol_type = other RNA
gttgaggcagagactgatccact

SEQ ID NO: 792 - RNA, 23 nt, Homo sapiens
  source 1..23: mol_type = other RNA
tgaggcagagactgatccacttc

SEQ ID NO: 793 - RNA, 23 nt, Homo sapiens
  source 1..23: mol_type = other RNA
agactgatccacttctctgccaa

SEQ ID NO: 794 - RNA, 23 nt, Homo sapiens
  source 1..23: mol_type = other RNA
actgatccacttctctgccaaag

SEQ ID NO: 795 - RNA, 23 nt, Homo sapiens
  source 1..23: mol_type = other RNA
tgatccacttctctgccaaagat

SEQ ID NO: 796 - RNA, 23 nt, Homo sapiens
  source 1..23: mol_type = other RNA
gatccacttctctgccaaagatg

SEQ ID NO: 797 - RNA, 23 nt, Homo sapiens
  source 1..23: mol_type = other RNA
tccacttctctgccaaagatgtc

SEQ ID NO: 798 - RNA, 23 nt, Homo sapiens
  source 1..23: mol_type = other RNA
ccacttctctgccaaagatgtca

SEQ ID NO: 799 - RNA, 23 nt, Homo sapiens
  source 1..23: mol_type = other RNA
aggtctggaatgcaaagtcaagg

SEQ ID NO: 800 - RNA, 23 nt, Homo sapiens
  source 1..23: mol_type = other RNA
tctggaatgcaaagtcaaggagc

SEQ ID NO: 801 - RNA, 23 nt, Homo sapiens
  source 1..23: mol_type = other RNA
ctggaatgcaaagtcaaggagca

SEQ ID NO: 802 - RNA, 23 nt, Homo sapiens
  source 1..23: mol_type = other RNA
gcaaagtcaaggagcatggaatc

SEQ ID NO: 803 - RNA, 23 nt, Homo sapiens
  source 1..23: mol_type = other RNA
aaagtcaaggagcatggaatccc

SEQ ID NO: 804 - RNA, 23 nt, Homo sapiens
  source 1..23: mol_type = other RNA
aaatggttccgacttgtccctct

SEQ ID NO: 805 - RNA, 23 nt, Homo sapiens
  source 1..23: mol_type = other RNA
aatggttccgacttgtccctctc

SEQ ID NO: 806 - RNA, 23 nt, Homo sapiens
  source 1..23: mol_type = other RNA
ttccgacttgtccctctctcagc

SEQ ID NO: 807 - RNA, 23 nt, Homo sapiens
  source 1..23: mol_type = other RNA
agcctccttgcctggaactcact

SEQ ID NO: 808 - RNA, 23 nt, Homo sapiens
  source 1..23: mol_type = other RNA
cctccttgcctggaactcactca

SEQ ID NO: 809 - RNA, 23 nt, Homo sapiens
  source 1..23: mol_type = other RNA
ctccttgcctggaactcactcac

SEQ ID NO: 810 - RNA, 23 nt, Homo sapiens
  source 1..23: mol_type = other RNA
tccttgcctggaactcactcact

SEQ ID NO: 811 - RNA, 23 nt, Homo sapiens
  source 1..23: mol_type = other RNA
ccttgcctggaactcactcactc

SEQ ID NO: 812 - RNA, 23 nt, Homo sapiens
  source 1..23: mol_type = other RNA
cttgcctggaactcactcactct

SEQ ID NO: 813 - RNA, 23 nt, Homo sapiens
  source 1..23: mol_type = other RNA
tgcctggaactcactcactctgg

SEQ ID NO: 814 - RNA, 23 nt, Homo sapiens
  source 1..23: mol_type = other RNA
cctggaactcactcactctgggt

SEQ ID NO: 815 - RNA, 23 nt, Homo sapiens
  source 1..23: mol_type = other RNA
ctggaactcactcactctgggtg

SEQ ID NO: 816 - RNA, 23 nt, Homo sapiens
  source 1..23: mol_type = other RNA
tggaactcactcactctgggtgc

SEQ ID NO: 817 - RNA, 23 nt, Homo sapiens
  source 1..23: mol_type = other RNA
gaactcactcactctgggtgcct

SEQ ID NO: 818 - RNA, 23 nt, Homo sapiens
  source 1..23: mol_type = other RNA
aactcactcactctgggtgcctc

SEQ ID NO: 819 - RNA, 23 nt, Homo sapiens
  source 1..23: mol_type = other RNA
ggcatttcaccattcaaacaggt

SEQ ID NO: 820 - RNA, 23 nt, Homo sapiens
  source 1..23: mol_type = other RNA
gcatttcaccattcaaacaggtc

SEQ ID NO: 821 - RNA, 23 nt, Homo sapiens
  source 1..23: mol_type = other RNA
catttcaccattcaaacaggtcg

SEQ ID NO: 822 - RNA, 23 nt, Homo sapiens
  source 1..23: mol_type = other RNA
atttcaccattcaaacaggtcga

SEQ ID NO: 823 - RNA, 23 nt, Homo sapiens
  source 1..23: mol_type = other RNA
tttcaccattcaaacaggtcgag

SEQ ID NO: 824 - RNA, 23 nt, Homo sapiens
  source 1..23: mol_type = other RNA
ttcaccattcaaacaggtcgagc

SEQ ID NO: 825 - RNA, 23 nt, Homo sapiens
  source 1..23: mol_type = other RNA
caccattcaaacaggtcgagctg

SEQ ID NO: 826 - RNA, 23 nt, Homo sapiens
  source 1..23: mol_type = other RNA
agctgctcccaatgtgccgatgt

SEQ ID NO: 827 - RNA, 23 nt, Homo sapiens
  source 1..23: mol_type = other RNA
cgatgtccgtgggcagaatgact

SEQ ID NO: 828 - RNA, 23 nt, Homo sapiens
  source 1..23: mol_type = other RNA
atgtccgtgggcagaatgacttt

SEQ ID NO: 829 - RNA, 23 nt, Homo sapiens
  source 1..23: mol_type = other RNA
tttattgagctcttgttccgtgc

SEQ ID NO: 830 - RNA, 23 nt, Homo sapiens
  source 1..23: mol_type = other RNA
ttattgagctcttgttccgtgcc

SEQ ID NO: 831 - RNA, 23 nt, Homo sapiens
  source 1..23: mol_type = other RNA
tattgagctcttgttccgtgcca

SEQ ID NO: 832 - RNA, 23 nt, Homo sapiens
  source 1..23: mol_type = other RNA
attgagctcttgttccgtgccag

SEQ ID NO: 833 - RNA, 23 nt, Homo sapiens
  source 1..23: mol_type = other RNA
ttgagctcttgttccgtgccagg

SEQ ID NO: 834 - RNA, 23 nt, Homo sapiens
  source 1..23: mol_type = other RNA
gccaggcattcaatcctcaggtc

SEQ ID NO: 835 - RNA, 23 nt, Homo sapiens
  source 1..23: mol_type = other RNA
ccaggcattcaatcctcaggtct

SEQ ID NO: 836 - RNA, 23 nt, Homo sapiens
  source 1..23: mol_type = other RNA
aggcattcaatcctcaggtctcc

SEQ ID NO: 837 - RNA, 23 nt, Homo sapiens
  source 1..23: mol_type = other RNA
gcattcaatcctcaggtctccac

SEQ ID NO: 838 - RNA, 23 nt, Homo sapiens
  source 1..23: mol_type = other RNA
attcaatcctcaggtctccacca

SEQ ID NO: 839 - RNA, 23 nt, Homo sapiens
  source 1..23: mol_type = other RNA
tcaatcctcaggtctccaccaag

SEQ ID NO: 840 - RNA, 23 nt, Homo sapiens
  source 1..23: mol_type = other RNA
caatcctcaggtctccaccaagg

SEQ ID NO: 841 - RNA, 23 nt, Homo sapiens
  source 1..23: mol_type = other RNA
ccaccaaggaggcaggattcttc

SEQ ID NO: 842 - RNA, 23 nt, Homo sapiens
  source 1..23: mol_type = other RNA
caccaaggaggcaggattcttcc

SEQ ID NO: 843 - RNA, 23 nt, Homo sapiens
  source 1..23: mol_type = other RNA
accaaggaggcaggattcttccc

SEQ ID NO: 844 - RNA, 23 nt, Homo sapiens
  source 1..23: mol_type = other RNA
ccaaggaggcaggattcttccca

SEQ ID NO: 845 - RNA, 23 nt, Homo sapiens
  source 1..23: mol_type = other RNA
caaggaggcaggattcttcccat

SEQ ID NO: 846 - RNA, 23 nt, Homo sapiens
  source 1..23: mol_type = other RNA
aaggaggcaggattcttcccatg

SEQ ID NO: 847 - RNA, 23 nt, Homo sapiens
  source 1..23: mol_type = other RNA
aggaggcaggattcttcccatgg

SEQ ID NO: 848 - RNA, 23 nt, Homo sapiens
  source 1..23: mol_type = other RNA
ggaggcaggattcttcccatgga

SEQ ID NO: 849 - RNA, 23 nt, Homo sapiens
  source 1..23: mol_type = other RNA
aggcaggattcttcccatggata

SEQ ID NO: 850 - RNA, 23 nt, Homo sapiens
  source 1..23: mol_type = other RNA
gcaggattcttcccatggatagg

SEQ ID NO: 851 - RNA, 23 nt, Homo sapiens
  source 1..23: mol_type = other RNA
caggattcttcccatggataggg

SEQ ID NO: 852 - RNA, 23 nt, Homo sapiens
  source 1..23: mol_type = other RNA
gggctgcagggacaaacatcgtt

SEQ ID NO: 853 - RNA, 23 nt, Homo sapiens
  source 1..23: mol_type = other RNA
ggctgcagggacaaacatcgttg

SEQ ID NO: 854 - RNA, 23 nt, Homo sapiens
  source 1..23: mol_type = other RNA
gctgcagggacaaacatcgttgg

SEQ ID NO: 855 - RNA, 23 nt, Homo sapiens
  source 1..23: mol_type = other RNA
ctgcagggacaaacatcgttggg

SEQ ID NO: 856 - RNA, 23 nt, Homo sapiens
  source 1..23: mol_type = other RNA
gggtgagtgtgaaaggtgctgat

SEQ ID NO: 857 - RNA, 23 nt, Homo sapiens
  source 1..23: mol_type = other RNA
ggtgagtgtgaaaggtgctgatg

SEQ ID NO: 858 - RNA, 23 nt, Homo sapiens
  source 1..23: mol_type = other RNA
tgagtgtgaaaggtgctgatggc

SEQ ID NO: 859 - RNA, 23 nt, Homo sapiens
  source 1..23: mol_type = other RNA
gagtgtgaaaggtgctgatggcc

SEQ ID NO: 860 - RNA, 23 nt, Homo sapiens
  source 1..23: mol_type = other RNA
agtgtgaaaggtgctgatggccc

SEQ ID NO: 861 - RNA, 23 nt, Homo sapiens
  source 1..23: mol_type = other RNA
gtgtgaaaggtgctgatggccct

SEQ ID NO: 862 - RNA, 23 nt, Homo sapiens
  source 1..23: mol_type = other RNA
tgtgaaaggtgctgatggccctc

SEQ ID NO: 863 - RNA, 23 nt, Homo sapiens
  source 1..23: mol_type = other RNA
gtgaaaggtgctgatggccctca

SEQ ID NO: 864 - RNA, 23 nt, Homo sapiens
  source 1..23: mol_type = other RNA
tggccctcatctccagctaactg

SEQ ID NO: 865 - RNA, 23 nt, Homo sapiens
  source 1..23: mol_type = other RNA
ggccctcatctccagctaactgt

SEQ ID NO: 866 - RNA, 23 nt, Homo sapiens
  source 1..23: mol_type = other RNA
gccctcatctccagctaactgtg

SEQ ID NO: 867 - RNA, 23 nt, Homo sapiens
  source 1..23: mol_type = other RNA
ccctcatctccagctaactgtgg

SEQ ID NO: 868 - RNA, 23 nt, Homo sapiens
  source 1..23: mol_type = other RNA
cagctaactgtggagaagcccct

SEQ ID NO: 869 - RNA, 23 nt, Homo sapiens
  source 1..23: mol_type = other RNA
agctaactgtggagaagcccctg

SEQ ID NO: 870 - RNA, 23 nt, Homo sapiens
  source 1..23: mol_type = other RNA
tccctgattaatggaggcttagc

SEQ ID NO: 871 - RNA, 23 nt, Homo sapiens
  source 1..23: mol_type = other RNA
cctgattaatggaggcttagctt

SEQ ID NO: 872 - RNA, 23 nt, Homo sapiens
  source 1..23: mol_type = other RNA
ctgattaatggaggcttagcttt

SEQ ID NO: 873 - RNA, 23 nt, Homo sapiens
  source 1..23: mol_type = other RNA
tgattaatggaggcttagctttc

SEQ ID NO: 874 - RNA, 23 nt, Homo sapiens
  source 1..23: mol_type = other RNA
attaatggaggcttagctttctg

SEQ ID NO: 875 - RNA, 23 nt, Homo sapiens
  source 1..23: mol_type = other RNA
ttaatggaggcttagctttctgg

SEQ ID NO: 876 - RNA, 23 nt, Homo sapiens
  source 1..23: mol_type = other RNA
taatggaggcttagctttctgga

SEQ ID NO: 877 - RNA, 23 nt, Homo sapiens
  source 1..23: mol_type = other RNA
aatggaggcttagctttctggat

SEQ ID NO: 878 - RNA, 23 nt, Homo sapiens
  source 1..23: mol_type = other RNA
atggaggcttagctttctggatg

SEQ ID NO: 879 - RNA, 23 nt, Homo sapiens
  source 1..23: mol_type = other RNA
tggaggcttagctttctggatgg

SEQ ID NO: 880 - RNA, 23 nt, Homo sapiens
  source 1..23: mol_type = other RNA
ggaggcttagctttctggatggc

SEQ ID NO: 881 - RNA, 23 nt, Homo sapiens
  source 1..23: mol_type = other RNA
aggcttagctttctggatggcat

SEQ ID NO: 882 - RNA, 23 nt, Homo sapiens
  source 1..23: mol_type = other RNA
ctgtgccttggtttcctgagcca

SEQ ID NO: 883 - RNA, 23 nt, Homo sapiens
  source 1..23: mol_type = other RNA
tgtgccttggtttcctgagccac

SEQ ID NO: 884 - RNA, 23 nt, Homo sapiens
  source 1..23: mol_type = other RNA
tgccttggtttcctgagccacct

SEQ ID NO: 885 - RNA, 23 nt, Homo sapiens
  source 1..23: mol_type = other RNA
gccttggtttcctgagccacctt

SEQ ID NO: 886 - RNA, 23 nt, Homo sapiens
  source 1..23: mol_type = other RNA
ccttggtttcctgagccaccttt

SEQ ID NO: 887 - RNA, 23 nt, Homo sapiens
  source 1..23: mol_type = other RNA
cttggtttcctgagccaccttta

SEQ ID NO: 888 - RNA, 23 nt, Homo sapiens
  source 1..23: mol_type = other RNA
ttggtttcctgagccacctttac

SEQ ID NO: 889 - RNA, 23 nt, Homo sapiens
  source 1..23: mol_type = other RNA
tggtttcctgagccacctttact

SEQ ID NO: 890 - RNA, 23 nt, Homo sapiens
  source 1..23: mol_type = other RNA
ggtttcctgagccacctttactc

SEQ ID NO: 891 - RNA, 23 nt, Homo sapiens
  source 1..23: mol_type = other RNA
gtttcctgagccacctttactct

SEQ ID NO: 892 - RNA, 23 nt, Homo sapiens
  source 1..23: mol_type = other RNA
tttcctgagccacctttactctg

SEQ ID NO: 893 - RNA, 23 nt, Homo sapiens
  source 1..23: mol_type = other RNA
tcctgagccacctttactctgct

SEQ ID NO: 894 - RNA, 23 nt, Homo sapiens
  source 1..23: mol_type = other RNA
agccacctttactctgctctatg

SEQ ID NO: 895 - RNA, 23 nt, Homo sapiens
  source 1..23: mol_type = other RNA
ccacctttactctgctctatgcc

SEQ ID NO: 896 - RNA, 23 nt, Homo sapiens
  source 1..23: mol_type = other RNA
cacctttactctgctctatgcca

SEQ ID NO: 897 - RNA, 23 nt, Homo sapiens
  source 1..23: mol_type = other RNA
acctttactctgctctatgccag

SEQ ID NO: 898 - RNA, 23 nt, Homo sapiens
  source 1..23: mol_type = other RNA
cctttactctgctctatgccagg

SEQ ID NO: 899 - RNA, 23 nt, Homo sapiens
  source 1..23: mol_type = other RNA
ctttactctgctctatgccaggc

SEQ ID NO: 900 - RNA, 23 nt, Homo sapiens
  source 1..23: mol_type = other RNA
ttactctgctctatgccaggctg

SEQ ID NO: 901 - RNA, 23 nt, Homo sapiens
  source 1..23: mol_type = other RNA
actctgctctatgccaggctgtg

SEQ ID NO: 902 - RNA, 23 nt, Homo sapiens
  source 1..23: mol_type = other RNA
tctgctctatgccaggctgtgct

SEQ ID NO: 903 - RNA, 23 nt, Homo sapiens
  source 1..23: mol_type = other RNA
ctgctctatgccaggctgtgcta

SEQ ID NO: 904 - RNA, 23 nt, Homo sapiens
  source 1..23: mol_type = other RNA
tgctctatgccaggctgtgctag

SEQ ID NO: 905 - RNA, 23 nt, Homo sapiens
  source 1..23: mol_type = other RNA
ggagccatcacctaggactgact

SEQ ID NO: 906 - RNA, 23 nt, Homo sapiens
  source 1..23: mol_type = other RNA
gagccatcacctaggactgactc

SEQ ID NO: 907 - RNA, 23 nt, Homo sapiens
  source 1..23: mol_type = other RNA
agccatcacctaggactgactcg

SEQ ID NO: 908 - RNA, 23 nt, Homo sapiens
  source 1..23: mol_type = other RNA
catcacctaggactgactcggca

SEQ ID NO: 909 - RNA, 23 nt, Homo sapiens
  source 1..23: mol_type = other RNA
atcacctaggactgactcggcag

SEQ ID NO: 910 - RNA, 23 nt, Homo sapiens
  source 1..23: mol_type = other RNA
ttcgcacccctacttcacagagg

SEQ ID NO: 911 - RNA, 23 nt, Homo sapiens
  source 1..23: mol_type = other RNA
tcgcacccctacttcacagagga

SEQ ID NO: 912 - RNA, 23 nt, Homo sapiens
  source 1..23: mol_type = other RNA
cgcacccctacttcacagaggaa

SEQ ID NO: 913 - RNA, 23 nt, Homo sapiens
  source 1..23: mol_type = other RNA
ttcacagaggaagaaacctggaa

SEQ ID NO: 914 - RNA, 23 nt, Homo sapiens
  source 1..23: mol_type = other RNA
tcacagaggaagaaacctggaac

SEQ ID NO: 915 - RNA, 23 nt, Homo sapiens
  source 1..23: mol_type = other RNA
acagaggaagaaacctggaacca

SEQ ID NO: 916 - RNA, 23 nt, Homo sapiens
  source 1..23: mol_type = other RNA
tgccaagctcacacagcaggaac

SEQ ID NO: 917 - RNA, 23 nt, Homo sapiens
  source 1..23: mol_type = other RNA
gccaagctcacacagcaggaact

SEQ ID NO: 918 - RNA, 23 nt, Homo sapiens
  source 1..23: mol_type = other RNA
ccaagctcacacagcaggaactg

SEQ ID NO: 919 - RNA, 23 nt, Homo sapiens
  source 1..23: mol_type = other RNA
caagctcacacagcaggaactga

SEQ ID NO: 920 - RNA, 23 nt, Homo sapiens
  source 1..23: mol_type = other RNA
tcacacagcaggaactgagccag

SEQ ID NO: 921 - RNA, 23 nt, Homo sapiens
  source 1..23: mol_type = other RNA
cacacagcaggaactgagccaga

SEQ ID NO: 922 - RNA, 23 nt, Homo sapiens
  source 1..23: mol_type = other RNA
acacagcaggaactgagccagaa

SEQ ID NO: 923 - RNA, 23 nt, Homo sapiens
  source 1..23: mol_type = other RNA
cacagcaggaactgagccagaaa

SEQ ID NO: 924 - RNA, 23 nt, Homo sapiens
  source 1..23: mol_type = other RNA
acagcaggaactgagccagaaac

SEQ ID NO: 925 - RNA, 23 nt, Homo sapiens
  source 1..23: mol_type = other RNA
cagcaggaactgagccagaaacg

SEQ ID NO: 926 - RNA, 23 nt, Homo sapiens
  source 1..23: mol_type = other RNA
agcaggaactgagccagaaacgc

SEQ ID NO: 927 - RNA, 23 nt, Homo sapiens
  source 1..23: mol_type = other RNA
gcaggaactgagccagaaacgca

SEQ ID NO: 928 - RNA, 23 nt, Homo sapiens
  source 1..23: mol_type = other RNA
caggaactgagccagaaacgcag

SEQ ID NO: 929 - RNA, 23 nt, Homo sapiens
  source 1..23: mol_type = other RNA
aggaactgagccagaaacgcaga

SEQ ID NO: 930 - RNA, 23 nt, Homo sapiens
  source 1..23: mol_type = other RNA
ctgagccagaaacgcagattggg

SEQ ID NO: 931 - RNA, 23 nt, Homo sapiens
  source 1..23: mol_type = other RNA
tgagccagaaacgcagattgggc

SEQ ID NO: 932 - RNA, 23 nt, Homo sapiens
  source 1..23: mol_type = other RNA
cagaaacgcagattgggctggct

SEQ ID NO: 933 - RNA, 23 nt, Homo sapiens
  source 1..23: mol_type = other RNA
agaaacgcagattgggctggctc

SEQ ID NO: 934 - RNA, 23 nt, Homo sapiens
  source 1..23: mol_type = other RNA
gaaacgcagattgggctggctct

SEQ ID NO: 935 - RNA, 23 nt, Homo sapiens
  source 1..23: mol_type = other RNA
ccaagcctcttcttacttcaccc

SEQ ID NO: 936 - RNA, 23 nt, Homo sapiens
  source 1..23: mol_type = other RNA
caagcctcttcttacttcacccg

SEQ ID NO: 937 - RNA, 23 nt, Homo sapiens
  source 1..23: mol_type = other RNA
aagcctcttcttacttcacccgg

SEQ ID NO: 938 - RNA, 23 nt, Homo sapiens
  source 1..23: mol_type = other RNA
agcctcttcttacttcacccggc

SEQ ID NO: 939 - RNA, 23 nt, Homo sapiens
  source 1..23: mol_type = other RNA
gcctcttcttacttcacccggct

SEQ ID NO: 940 - RNA, 23 nt, Homo sapiens
  source 1..23: mol_type = other RNA
cctcttcttacttcacccggctg

SEQ ID NO: 941 - RNA, 23 nt, Homo sapiens
  source 1..23: mol_type = other RNA
ctcttcttacttcacccggctgg

SEQ ID NO: 942 - RNA, 23 nt, Homo sapiens
  source 1..23: mol_type = other RNA
tcttcttacttcacccggctggg

SEQ ID NO: 943 - RNA, 23 nt, Homo sapiens
  source 1..23: mol_type = other RNA
ttcttacttcacccggctgggct

SEQ ID NO: 944 - RNA, 23 nt, Homo sapiens
  source 1..23: mol_type = other RNA
tacgggtaacagtgaggctggga

SEQ ID NO: 945 - RNA, 23 nt, Homo sapiens
  source 1..23: mol_type = other RNA
acgggtaacagtgaggctgggaa

SEQ ID NO: 946 - RNA, 23 nt, Homo sapiens
  source 1..23: mol_type = other RNA
gaacacagaccaggaagctcggt

SEQ ID NO: 947 - RNA, 23 nt, Homo sapiens
  source 1..23: mol_type = other RNA
aacacagaccaggaagctcggtg

SEQ ID NO: 948 - RNA, 23 nt, Homo sapiens
  source 1..23: mol_type = other RNA
acacagaccaggaagctcggtga

SEQ ID NO: 949 - RNA, 23 nt, Homo sapiens
  source 1..23: mol_type = other RNA
acagaccaggaagctcggtgagt

SEQ ID NO: 950 - RNA, 23 nt, Homo sapiens
  source 1..23: mol_type = other RNA
agaccaggaagctcggtgagtga

SEQ ID NO: 951 - RNA, 23 nt, Homo sapiens
  source 1..23: mol_type = other RNA
gaccaggaagctcggtgagtgat

SEQ ID NO: 952 - RNA, 23 nt, Homo sapiens
  source 1..23: mol_type = other RNA
accaggaagctcggtgagtgatg

SEQ ID NO: 953 - RNA, 23 nt, Homo sapiens
  source 1..23: mol_type = other RNA
aggaagctcggtgagtgatggca

SEQ ID NO: 954 - RNA, 23 nt, Homo sapiens
  source 1..23: mol_type = other RNA
gaagctcggtgagtgatggcaga

SEQ ID NO: 955 - RNA, 23 nt, Homo sapiens
  source 1..23: mol_type = other RNA
agctcggtgagtgatggcagaac

SEQ ID NO: 956 - RNA, 23 nt, Homo sapiens
  source 1..23: mol_type = other RNA
ctcggtgagtgatggcagaacga

SEQ ID NO: 957 - RNA, 23 nt, Homo sapiens
  source 1..23: mol_type = other RNA
cggtgagtgatggcagaacgatg

SEQ ID NO: 958 - RNA, 23 nt, Homo sapiens
  source 1..23: mol_type = other RNA
ggtgagtgatggcagaacgatgc

SEQ ID NO: 959 - RNA, 23 nt, Homo sapiens
  source 1..23: mol_type = other RNA
tgattcactggcctggcggagat

SEQ ID NO: 960 - RNA, 23 nt, Homo sapiens
  source 1..23: mol_type = other RNA
tggcctggcggagatgcttctaa

SEQ ID NO: 961 - RNA, 23 nt, Homo sapiens
  source 1..23: mol_type = other RNA
ctggcggagatgcttctaaggca

SEQ ID NO: 962 - RNA, 23 nt, Homo sapiens
  source 1..23: mol_type = other RNA
ggccaacaactgtccctccttga

SEQ ID NO: 963 - RNA, 23 nt, Homo sapiens
  source 1..23: mol_type = other RNA
gccaacaactgtccctccttgag

SEQ ID NO: 964 - RNA, 23 nt, Homo sapiens
  source 1..23: mol_type = other RNA
ccaacaactgtccctccttgagc

SEQ ID NO: 965 - RNA, 23 nt, Homo sapiens
  source 1..23: mol_type = other RNA
caacaactgtccctccttgagca

SEQ ID NO: 966 - RNA, 23 nt, Homo sapiens
  source 1..23: mol_type = other RNA
aacaactgtccctccttgagcac

SEQ ID NO: 967 - RNA, 23 nt, Homo sapiens
  source 1..23: mol_type = other RNA
acaactgtccctccttgagcacc

SEQ ID NO: 968 - RNA, 23 nt, Homo sapiens
  source 1..23: mol_type = other RNA
caactgtccctccttgagcacca

SEQ ID NO: 969 - RNA, 23 nt, Homo sapiens
  source 1..23: mol_type = other RNA
aactgtccctccttgagcaccag

SEQ ID NO: 970 - RNA, 23 nt, Homo sapiens
  source 1..23: mol_type = other RNA
ccccacccaagcaagcagacatt

SEQ ID NO: 971 - RNA, 23 nt, Homo sapiens
  source 1..23: mol_type = other RNA
acccaagcaagcagacatttatc

SEQ ID NO: 972 - RNA, 23 nt, Homo sapiens
  source 1..23: mol_type = other RNA
caagcaagcagacatttatcttt

SEQ ID NO: 973 - RNA, 23 nt, Homo sapiens
  source 1..23: mol_type = other RNA
ttgggtctgtcctctctgttgcc

SEQ ID NO: 974 - RNA, 23 nt, Homo sapiens
  source 1..23: mol_type = other RNA
tgggtctgtcctctctgttgcct

SEQ ID NO: 975 - RNA, 23 nt, Homo sapiens
  source 1..23: mol_type = other RNA
gggtctgtcctctctgttgcctt

SEQ ID NO: 976 - RNA, 23 nt, Homo sapiens
  source 1..23: mol_type = other RNA
ggtctgtcctctctgttgccttt

SEQ ID NO: 977 - RNA, 23 nt, Homo sapiens
  source 1..23: mol_type = other RNA
aacttgaagatatttattctggg

SEQ ID NO: 978 - RNA, 23 nt, Homo sapiens
  source 1..23: mol_type = other RNA
acttgaagatatttattctgggt

SEQ ID NO: 979 - RNA, 23 nt, Homo sapiens
  source 1..23: mol_type = other RNA
acctgttttgcttttgtaacttg

SEQ ID NO: 980 - RNA, 23 nt, Homo sapiens
  source 1..23: mol_type = other RNA
ttctagacctgttttgcttttgt

SEQ ID NO: 981 - RNA, 19 nt, Homo sapiens
  source 1..19: mol_type = other RNA
aacttttctagacctgttt

SEQ ID NO: 982 - RNA, 21 nt, synthetic construct
  misc_feature 1..21: note = P3119MW02sense
  modified_base 1..6: mod_base = OTHER; note = 2'-Ome modification
  modified_base 7: mod_base = OTHER; note = 2'-F modification
  modified_base 8: mod_base = OTHER; note = 2'-Ome modification
  modified_base 9..11: mod_base = OTHER; note = 2'-F modification
  modified_base 12..21: mod_base = OTHER; note = 2'-Ome modification
  modified_base 1..2: mod_base = OTHER; note = Phosphorothioate connection
  modified_base 2..3: mod_base = OTHER; note = Phosphorothioate connection
  source 1..21: mol_type = other RNA
cacattcgcacccctacttca

SEQ ID NO: 983 - RNA, 21 nt, synthetic construct
  misc_feature 1..21: note = P3196MW02sense
  modified_base 1..6: mod_base = OTHER; note = 2'-Ome modification
  modified_base 7: mod_base = OTHER; note = 2'-F modification
  modified_base 8: mod_base = OTHER; note = 2'-Ome modification
  modified_base 9..11: mod_base = OTHER; note = 2'-F modification
  modified_base 12..21: mod_base = OTHER; note = 2'-Ome modification
  modified_base 1..2: mod_base = OTHER; note = Phosphorothioate connection
  modified_base 2..3: mod_base = OTHER; note = Phosphorothioate connection
  source 1..21: mol_type = other RNA
actgagccagaaacgcagatt

SEQ ID NO: 984 - RNA, 21 nt, synthetic construct
  misc_feature 1..21: note = P3464MW02sense
  modified_base 1..6: mod_base = OTHER; note = 2'-Ome modification
  modified_base 7: mod_base = OTHER; note = 2'-F modification
  modified_base 8: mod_base = OTHER; note = 2'-Ome modification
  modified_base 9..11: mod_base = OTHER; note = 2'-F modification
  modified_base 12..21: mod_base = OTHER; note = 2'-Ome modification
  modified_base 1..2: mod_base = OTHER; note = Phosphorothioate connection
  modified_base 2..3: mod_base = OTHER; note = Phosphorothioate connection
  source 1..21: mol_type = other RNA
cccaagcaagcagacatttat

SEQ ID NO: 985 - RNA, 21 nt, synthetic construct
  misc_feature 1..21: note = P3543MW02sense
  modified_base 1..6: mod_base = OTHER; note = 2'-Ome modification
  modified_base 7: mod_base = OTHER; note = 2'-F modification
  modified_base 8: mod_base = OTHER; note = 2'-Ome modification
  modified_base 9..11: mod_base = OTHER; note = 2'-F modification
  modified_base 12..21: mod_base = OTHER; note = 2'-Ome modification
  modified_base 1..2: mod_base = OTHER; note = Phosphorothioate connection
  modified_base 2..3: mod_base = OTHER; note = Phosphorothioate connection
  source 1..21: mol_type = other RNA
cttttgtaacttgaagatatt

SEQ ID NO: 986 - RNA, 21 nt, synthetic construct
  misc_feature 1..21: note = P3554MW02sense
  modified_base 1..6: mod_base = OTHER; note = 2'-Ome modification
  modified_base 7: mod_base = OTHER; note = 2'-F modification
  modified_base 8: mod_base = OTHER; note = 2'-Ome modification
  modified_base 9..11: mod_base = OTHER; note = 2'-F modification
  modified_base 12..21: mod_base = OTHER; note = 2'-Ome modification
  modified_base 1..2: mod_base = OTHER; note = Phosphorothioate connection
  modified_base 2..3: mod_base = OTHER; note = Phosphorothioate connection
  source 1..21: mol_type = other RNA
tgaagatatttattctgggtt

SEQ ID NO: 987 - RNA, 21 nt, synthetic construct
  misc_feature 1..21: note = SP340MW02sense
  modified_base 1..6: mod_base = OTHER; note = 2'-Ome modification
  modified_base 7: mod_base = OTHER; note = 2'-F modification
  modified_base 8: mod_base = OTHER; note = 2'-Ome modification
  modified_base 9..11: mod_base = OTHER; note = 2'-F modification
  modified_base 12..21: mod_base = OTHER; note = 2'-Ome modification
  modified_base 1..2: mod_base = OTHER; note = Phosphorothioate connection
  modified_base 2..3: mod_base = OTHER; note = Phosphorothioate connection
  source 1..21: mol_type = other RNA
gccaacttttctagacctgtt

SEQ ID NO: 988 - RNA, 21 nt, synthetic construct
  misc_feature 1..21: note = SP341MW02sense
  modified_base 1..6: mod_base = OTHER; note = 2'-Ome modification
  modified_base 7: mod_base = OTHER; note = 2'-F modification
  modified_base 8: mod_base = OTHER; note = 2'-Ome modification
  modified_base 9..11: mod_base = OTHER; note = 2'-F modification
  modified_base 12..21: mod_base = OTHER; note = 2'-Ome modification
  modified_base 1..2: mod_base = OTHER; note = Phosphorothioate connection
  modified_base 2..3: mod_base = OTHER; note = Phosphorothioate connection
  source 1..21: mol_type = other RNA
ccaacttttctagacctgttt

SEQ ID NO: 989 - RNA, 21 nt, synthetic construct
  misc_feature 1..21: note = SP342MW02sense
  modified_base 1..6: mod_base = OTHER; note = 2'-Ome modification
  modified_base 7: mod_base = OTHER; note = 2'-F modification
  modified_base 8: mod_base = OTHER; note = 2'-Ome modification
  modified_base 9..11: mod_base = OTHER; note = 2'-F modification
  modified_base 12..21: mod_base = OTHER; note = 2'-Ome modification
  modified_base 1..2: mod_base = OTHER; note = Phosphorothioate connection
  modified_base 2..3: mod_base = OTHER; note = Phosphorothioate connection
  source 1..21: mol_type = other RNA
caacttttctagacctgtttt

SEQ ID NO: 990 - RNA, 21 nt, synthetic construct
  misc_feature 1..21: note = SP344MW02sense
  modified_base 1..6: mod_base = OTHER; note = 2'-Ome modification
  modified_base 7: mod_base = OTHER; note = 2'-F modification
  modified_base 8: mod_base = OTHER; note = 2'-Ome modification
  modified_base 9..11: mod_base = OTHER; note = 2'-F modification
  modified_base 12..21: mod_base = OTHER; note = 2'-Ome modification
  modified_base 1..2: mod_base = OTHER; note = Phosphorothioate connection
  modified_base 2..3: mod_base = OTHER; note = Phosphorothioate connection
  source 1..21: mol_type = other RNA
acttttctagacctgttttgc

SEQ ID NO: 991 - RNA, 21 nt, synthetic construct
  misc_feature 1..21: note = SP345MW02sense
  modified_base 1..6: mod_base = OTHER; note = 2'-Ome modification
  modified_base 7: mod_base = OTHER; note = 2'-F modification
  modified_base 8: mod_base = OTHER; note = 2'-Ome modification
  modified_base 9..11: mod_base = OTHER; note = 2'-F modification
  modified_base 12..21: mod_base = OTHER; note = 2'-Ome modification
  modified_base 1..2: mod_base = OTHER; note = Phosphorothioate connection
  modified_base 2..3: mod_base = OTHER; note = Phosphorothioate connection
  source 1..21: mol_type = other RNA
cttttctagacctgttttgct

SEQ ID NO: 992 - RNA, 21 nt, synthetic construct
  misc_feature 1..21: note = SP349MW02sense
  modified_base 1..6: mod_base = OTHER; note = 2'-Ome modification
  modified_base 7: mod_base = OTHER; note = 2'-F modification
  modified_base 8: mod_base = OTHER; note = 2'-Ome modification
  modified_base 9..11: mod_base = OTHER; note = 2'-F modification
  modified_base 12..21: mod_base = OTHER; note = 2'-Ome modification
  modified_base 1..2: mod_base = OTHER; note = Phosphorothioate connection
  modified_base 2..3: mod_base = OTHER; note = Phosphorothioate connection
  source 1..21: mol_type = other RNA
tctagacctgttttgcttttg

SEQ ID NO: 993 - RNA, 21 nt, synthetic construct
  misc_feature 1..21: note = SP351MW02sense
  modified_base 1..6: mod_base = OTHER; note = 2'-Ome modification
  modified_base 7: mod_base = OTHER; note = 2'-F modification
  modified_base 8: mod_base = OTHER; note = 2'-Ome modification
  modified_base 9..11: mod_base = OTHER; note = 2'-F modification
  modified_base 12..21: mod_base = OTHER; note = 2'-Ome modification
  modified_base 1..2: mod_base = OTHER; note = Phosphorothioate connection
  modified_base 2..3: mod_base = OTHER; note = Phosphorothioate connection
  source 1..21: mol_type = other RNA
agacctgttttgcttttgtaa

SEQ ID NO: 994 - RNA, 21 nt, synthetic construct
  misc_feature 1..21: note = WP3239MW02sense
  modified_base 1..6: mod_base = OTHER; note = 2'-Ome modification
  modified_base 7: mod_base = OTHER; note = 2'-F modification
  modified_base 8: mod_base = OTHER; note = 2'-Ome modification
  modified_base 9..11: mod_base = OTHER; note = 2'-F modification
  modified_base 12..21: mod_base = OTHER; note = 2'-Ome modification
  modified_base 1..2: mod_base = OTHER; note = Phosphorothioate connection
  modified_base 2..3: mod_base = OTHER; note = Phosphorothioate connection
  source 1..21: mol_type = other RNA
gggtacacattcgcaccccta

SEQ ID NO: 995 - RNA, 21 nt, synthetic construct
  misc_feature 1..21: note = WP3262MW02sense
  source 1..21: mol_type = other RNA
  modified_base 1..6: mod_base = OTHER; note = 2'-Ome modification
  modified_base 7: mod_base = OTHER; note = 2'-F modification
  modified_base 8: mod_base = OTHER; note = 2'-Ome modification
  modified_base 9..11: mod_base = OTHER; note = 2'-F modification
  modified_base 12..21: mod_base = OTHER; note = 2'-Ome modification
  modified_base 1..2: mod_base = OTHER; note = Phosphorothioate connection
  modified_base 2..3: mod_base = OTHER; note = Phosphorothioate connection
tcacagaggaagaaacctgga

SEQ ID NO: 996 - RNA, 21 nt, synthetic construct
  misc_feature 1..21: note = WP3315MW02sense
  modified_base 1..6: mod_base = OTHER; note = 2'-Ome modification
  modified_base 7: mod_base = OTHER; note = 2'-F modification
  modified_base 8: mod_base = OTHER; note = 2'-Ome modification
  modified_base 9..11: mod_base = OTHER; note = 2'-F modification
  modified_base 12..21: mod_base = OTHER; note = 2'-Ome modification
  modified_base 1..2: mod_base = OTHER; note = Phosphorothioate connection
  modified_base 2..3: mod_base = OTHER; note = Phosphorothioate connection
  source 1..21: mol_type = other RNA
gcaggaactgagccagaaacg

SEQ ID NO: 997 - RNA, 21 nt, synthetic construct
  misc_feature 1..21: note = WP3315-AMW02sense
  modified_base 1..6: mod_base = OTHER; note = 2'-Ome modification
  modified_base 7: mod_base = OTHER; note = 2'-F modification
  modified_base 8: mod_base = OTHER; note = 2'-Ome modification
  modified_base 9..11: mod_base = OTHER; note = 2'-F modification
  modified_base 12..21: mod_base = OTHER; note = 2'-Ome modification
  modified_base 1..2: mod_base = OTHER; note = Phosphorothioate connection
  modified_base 2..3: mod_base = OTHER; note = Phosphorothioate connection
  source 1..21: mol_type = other RNA
gcaggaactgagccagaaaca

SEQ ID NO: 998 - RNA, 21 nt, synthetic construct
  misc_feature 1..21: note = WP3323MW02sense
  modified_base 1..6: mod_base = OTHER; note = 2'-Ome modification
  modified_base 7: mod_base = OTHER; note = 2'-F modification
  modified_base 8: mod_base = OTHER; note = 2'-Ome modification
  modified_base 9..11: mod_base = OTHER; note = 2'-F modification
  modified_base 12..21: mod_base = OTHER; note = 2'-Ome modification
  modified_base 1..2: mod_base = OTHER; note = Phosphorothioate connection
  modified_base 2..3: mod_base = OTHER; note = Phosphorothioate connection
  source 1..21: mol_type = other RNA
tgagccagaaacgcagattgg

SEQ ID NO: 999 - RNA, 21 nt, synthetic construct
  misc_feature 1..21: note = Pt609MW02sense
  modified_base 1..6: mod_base = OTHER; note = 2'-Ome modification
  modified_base 7: mod_base = OTHER; note = 2'-F modification
  modified_base 8: mod_base = OTHER; note = 2'-Ome modification
  modified_base 9..11: mod_base = OTHER; note = 2'-F modification
  modified_base 12..21: mod_base = OTHER; note = 2'-Ome modification
  modified_base 1..2: mod_base = OTHER; note = Phosphorothioate connection
  modified_base 2..3: mod_base = OTHER; note = Phosphorothioate connection
  source 1..21: mol_type = other RNA
cctcaccaagatcctgcatgt

SEQ ID NO: 1000 - RNA, 21 nt, synthetic construct
  misc_feature 1..21: note = Pt890MW02sense
  modified_base 1..6: mod_base = OTHER; note = 2'-Ome modification
  modified_base 7: mod_base = OTHER; note = 2'-F modification
  modified_base 8: mod_base = OTHER; note = 2'-Ome modification
  modified_base 9..11: mod_base = OTHER; note = 2'-F modification
  modified_base 12..21: mod_base = OTHER; note = 2'-Ome modification
  modified_base 1..2: mod_base = OTHER; note = Phosphorothioate connection
  modified_base 2..3: mod_base = OTHER; note = Phosphorothioate connection
  source 1..21: mol_type = other RNA
tggtcaccgacttcgagaatg

SEQ ID NO: 1001 - RNA, 21 nt, synthetic construct
  misc_feature 1..21: note = Pt2530MW02sense
  modified_base 1..6: mod_base = OTHER; note = 2'-Ome modification
  modified_base 7: mod_base = OTHER; note = 2'-F modification
  modified_base 8: mod_base = OTHER; note = 2'-Ome modification
  modified_base 9..11: mod_base = OTHER; note = 2'-F modification
  modified_base 12..21: mod_base = OTHER; note = 2'-Ome modification
  modified_base 1..2: mod_base = OTHER; note = Phosphorothioate connection
  modified_base 2..3: mod_base = OTHER; note = Phosphorothioate connection
  source 1..21: mol_type = other RNA
cctccttgcctggaactcact

SEQ ID NO: 1002 - RNA, 21 nt, synthetic construct
  misc_feature 1..21: note = Pt2532MW02sense
  modified_base 1..6: mod_base = OTHER; note = 2'-Ome modification
  modified_base 7: mod_base = OTHER; note = 2'-F modification
  modified_base 8: mod_base = OTHER; note = 2'-Ome modification
  modified_base 9..11: mod_base = OTHER; note = 2'-F modification
  modified_base 12..21: mod_base = OTHER; note = 2'-Ome modification
  modified_base 1..2: mod_base = OTHER; note = Phosphorothioate connection
  modified_base 2..3: mod_base = OTHER; note = Phosphorothioate connection
  source 1..21: mol_type = other RNA
tccttgcctggaactcactca

SEQ ID NO: 1003 - RNA, 21 nt, synthetic construct
  misc_feature 1..21: note = Pt2533MW02sense
  modified_base 1..6: mod_base = OTHER; note = 2'-Ome modification
  modified_base 7: mod_base = OTHER; note = 2'-F modification
  modified_base 8: mod_base = OTHER; note = 2'-Ome modification
  modified_base 9..11: mod_base = OTHER; note = 2'-F modification
  modified_base 12..21: mod_base = OTHER; note = 2'-Ome modification
  modified_base 1..2: mod_base = OTHER; note = Phosphorothioate connection
  modified_base 2..3: mod_base = OTHER; note = Phosphorothioate connection
  source 1..21: mol_type = other RNA
ccttgcctggaactcactcac

SEQ ID NO: 1004 - RNA, 21 nt, synthetic construct
  misc_feature 1..21: note = Pt2534MW02sense
  modified_base 1..6: mod_base = OTHER; note = 2'-Ome modification
  modified_base 7: mod_base = OTHER; note = 2'-F modification
  modified_base 8: mod_base = OTHER; note = 2'-Ome modification
  modified_base 9..11: mod_base = OTHER; note = 2'-F modification
  modified_base 12..21: mod_base = OTHER; note = 2'-Ome modification
  modified_base 1..2: mod_base = OTHER; note = Phosphorothioate connection
  modified_base 2..3: mod_base = OTHER; note = Phosphorothioate connection
  source 1..21: mol_type = other RNA
cttgcctggaactcactcact

SEQ ID NO: 1005 - RNA, 21 nt, synthetic construct
  misc_feature 1..21: note = Pt2536MW02sense
  modified_base 1..6: mod_base = OTHER; note = 2'-Ome modification
  modified_base 7: mod_base = OTHER; note = 2'-F modification
  modified_base 8: mod_base = OTHER; note = 2'-Ome modification
  modified_base 9..11: mod_base = OTHER; note = 2'-F modification
  modified_base 12..21: mod_base = OTHER; note = 2'-Ome modification
  modified_base 1..2: mod_base = OTHER; note = Phosphorothioate connection
  modified_base 2..3: mod_base = OTHER; note = Phosphorothioate connection
  source 1..21: mol_type = other RNA
tgcctggaactcactcactct

SEQ ID NO: 1006 - RNA, 21 nt, synthetic construct
  misc_feature 1..21: note = Pt2538MW02sense
  modified_base 1..6: mod_base = OTHER; note = 2'-Ome modification
  modified_base 7: mod_base = OTHER; note = 2'-F modification
  modified_base 8: mod_base = OTHER; note = 2'-Ome modification
  modified_base 9..11: mod_base = OTHER; note = 2'-F modification
  modified_base 12..21: mod_base = OTHER; note = 2'-Ome modification
  modified_base 1..2: mod_base = OTHER; note = Phosphorothioate connection
  modified_base 2..3: mod_base = OTHER; note = Phosphorothioate connection
  source 1..21: mol_type = other RNA
cctggaactcactcactctgg

SEQ ID NO: 1007 - RNA, 21 nt, synthetic construct
  misc_feature 1..21: note = Pt2541MW02sense
  modified_base 1..6: mod_base = OTHER; note = 2'-Ome modification
  modified_base 7: mod_base = OTHER; note = 2'-F modification
  modified_base 8: mod_base = OTHER; note = 2'-Ome modification
  modified_base 9..11: mod_base = OTHER; note = 2'-F modification
  modified_base 12..21: mod_base = OTHER; note = 2'-Ome modification
  modified_base 1..2: mod_base = OTHER; note = Phosphorothioate connection
  modified_base 2..3: mod_base = OTHER; note = Phosphorothioate connection
  source 1..21: mol_type = other RNA
ggaactcactcactctgggtg

SEQ ID NO: 1008 - RNA, 21 nt, synthetic construct
  misc_feature 1..21: note = Pt2612MW02sense
  modified_base 1..6: mod_base = OTHER; note = 2'-Ome modification
  modified_base 7: mod_base = OTHER; note = 2'-F modification
  modified_base 8: mod_base = OTHER; note = 2'-Ome modification
  modified_base 9..11: mod_base = OTHER; note = 2'-F modification
  modified_base 12..21: mod_base = OTHER; note = 2'-Ome modification
  modified_base 1..2: mod_base = OTHER; note = Phosphorothioate connection
  modified_base 2..3: mod_base = OTHER; note = Phosphorothioate connection
  source 1..21: mol_type = other RNA
atttcaccattcaaacaggtc

SEQ ID NO: 1009 - RNA, 21 nt, synthetic construct
  misc_feature 1..21: note = Pt2675MW02sense
  modified_base 1..6: mod_base = OTHER; note = 2'-Ome modification
  modified_base 7: mod_base = OTHER; note = 2'-F modification
  modified_base 8: mod_base = OTHER; note = 2'-Ome modification
  modified_base 9..11: mod_base = OTHER; note = 2'-F modification
  modified_base 12..21: mod_base = OTHER; note = 2'-Ome modification
  modified_base 1..2: mod_base = OTHER; note = Phosphorothioate connection
  modified_base 2..3: mod_base = OTHER; note = Phosphorothioate connection
  source 1..21: mol_type = other RNA
gtccgtgggcagaatgacttt

SEQ ID NO: 1010 - RNA, 21 nt, synthetic construct
  misc_feature 1..21: note = Pt2697MW02sense
  modified_base 1..6: mod_base = OTHER; note = 2'-Ome modification
  modified_base 7: mod_base = OTHER; note = 2'-F modification
  modified_base 8: mod_base = OTHER; note = 2'-Ome modification
  modified_base 9..11: mod_base = OTHER; note = 2'-F modification
  modified_base 12..21: mod_base = OTHER; note = 2'-Ome modification
  modified_base 1..2: mod_base = OTHER; note = Phosphorothioate connection
  modified_base 2..3: mod_base = OTHER; note = Phosphorothioate connection
  source 1..21: mol_type = other RNA
attgagctcttgttccgtgcc

SEQ ID NO: 1011 - RNA, 21 nt, synthetic construct
  misc_feature 1..21: note = Pt2698MW02sense
  modified_base 1..6: mod_base = OTHER; note = 2'-Ome modification
  modified_base 7: mod_base = OTHER; note = 2'-F modification
  modified_base 8: mod_base = OTHER; note = 2'-Ome modification
  modified_base 9..11: mod_base = OTHER; note = 2'-F modification
  modified_base 12..21: mod_base = OTHER; note = 2'-Ome modification
  modified_base 1..2: mod_base = OTHER; note = Phosphorothioate connection
  modified_base 2..3: mod_base = OTHER; note = Phosphorothioate connection
  source 1..21: mol_type = other RNA
ttgagctcttgttccgtgcca

SEQ ID NO: 1012 - RNA, 21 nt, synthetic construct
  misc_feature 1..21: note = Pt2699MW02sense
  modified_base 1..6: mod_base = OTHER; note = 2'-Ome modification
  modified_base 7: mod_base = OTHER; note = 2'-F modification
  modified_base 8: mod_base = OTHER; note = 2'-Ome modification
  modified_base 9..11: mod_base = OTHER; note = 2'-F modification
  modified_base 12..21: mod_base = OTHER; note = 2'-Ome modification
  modified_base 1..2: mod_base = OTHER; note = Phosphorothioate connection
  modified_base 2..3: mod_base = OTHER; note = Phosphorothioate connection
  source 1..21: mol_type = other RNA
tgagctcttgttccgtgccag

SEQ ID NO: 1013 - RNA, 21 nt, synthetic construct
  misc_feature 1..21: note = Pt2700MW02sense
  modified_base 1..6: mod_base = OTHER; note = 2'-Ome modification
  modified_base 7: mod_base = OTHER; note = 2'-F modification
  modified_base 8: mod_base = OTHER; note = 2'-Ome modification
  modified_base 9..11: mod_base = OTHER; note = 2'-F modification
  modified_base 12..21: mod_base = OTHER; note = 2'-Ome modification
  modified_base 1..2: mod_base = OTHER; note = Phosphorothioate connection
  modified_base 2..3: mod_base = OTHER; note = Phosphorothioate connection
  source 1..21: mol_type = other RNA
gagctcttgttccgtgccagg

SEQ ID NO: 1014 - RNA, 21 nt, synthetic construct
  misc_feature 1..21: note = Pt2717MW02sense
  modified_base 1..6: mod_base = OTHER; note = 2'-Ome modification
  modified_base 7: mod_base = OTHER; note = 2'-F modification
  modified_base 8: mod_base = OTHER; note = 2'-Ome modification
  modified_base 9..11: mod_base = OTHER; note = 2'-F modification
  modified_base 12..21: mod_base = OTHER; note = 2'-Ome modification
  modified_base 1..2: mod_base = OTHER; note = Phosphorothioate connection
  modified_base 2..3: mod_base = OTHER; note = Phosphorothioate connection
  source 1..21: mol_type = other RNA
caggcattcaatcctcaggtc

SEQ ID NO: 1015 - RNA, 21 nt, synthetic construct
  misc_feature 1..21: note = Pt2727MW02sense
  modified_base 1..6: mod_base = OTHER; note = 2'-Ome modification
  modified_base 7: mod_base = OTHER; note = 2'-F modification
  modified_base 8: mod_base = OTHER; note = 2'-Ome modification
  modified_base 9..11: mod_base = OTHER; note = 2'-F modification
  modified_base 12..21: mod_base = OTHER; note = 2'-Ome modification
  modified_base 1..2: mod_base = OTHER; note = Phosphorothioate connection
  modified_base 2..3: mod_base = OTHER; note = Phosphorothioate connection
  source 1..21: mol_type = other RNA
atcctcaggtctccaccaagg

SEQ ID NO: 1016 - RNA, 21 nt, synthetic construct
  misc_feature 1..21: note = Pt2748MW02sense
  modified_base 1..6: mod_base = OTHER; note = 2'-Ome modification
  modified_base 7: mod_base = OTHER; note = 2'-F modification
  modified_base 8: mod_base = OTHER; note = 2'-Ome modification
  modified_base 9..11: mod_base = OTHER; note = 2'-F modification
  modified_base 12..21: mod_base = OTHER; note = 2'-Ome modification
  modified_base 1..2: mod_base = OTHER; note = Phosphorothioate connection
  modified_base 2..3: mod_base = OTHER; note = Phosphorothioate connection
  source 1..21: mol_type = other RNA
aggcaggattcttcccatgga

SEQ ID NO: 1017 - RNA, 21 nt, synthetic construct
  misc_feature 1..21: note = Pt2750MW02sense
  modified_base 1..6: mod_base = OTHER; note = 2'-Ome modification
  modified_base 7: mod_base = OTHER; note = 2'-F modification
  modified_base 8: mod_base = OTHER; note = 2'-Ome modification
  modified_base 9..11: mod_base = OTHER; note = 2'-F modification
  modified_base 12..21: mod_base = OTHER; note = 2'-Ome modification
  modified_base 1..2: mod_base = OTHER; note = Phosphorothioate connection
  modified_base 2..3: mod_base = OTHER; note = Phosphorothioate connection
  source 1..21: mol_type = other RNA
gcaggattcttcccatggata

SEQ ID NO: 1018 - RNA, 21 nt, synthetic construct
  misc_feature 1..21: note = Pt2752MW02sense
  modified_base 1..6: mod_base = OTHER; note = 2'-Ome modification
  modified_base 7: mod_base = OTHER; note = 2'-F modification
  modified_base 8: mod_base = OTHER; note = 2'-Ome modification
  modified_base 9..11: mod_base = OTHER; note = 2'-F modification
  modified_base 12..21: mod_base = OTHER; note = 2'-Ome modification
  modified_base 1..2: mod_base = OTHER; note = Phosphorothioate connection
  modified_base 2..3: mod_base = OTHER; note = Phosphorothioate connection
  source 1..21: mol_type = other RNA
aggattcttcccatggatagg

SEQ ID NO: 1019 - RNA, 21 nt, synthetic construct
  misc_feature 1..21: note = Pt2818MW02sense
  modified_base 1..6: mod_base = OTHER; note = 2'-Ome modification
  modified_base 7: mod_base = OTHER; note = 2'-F modification
  modified_base 8: mod_base = OTHER; note = 2'-Ome modification
  modified_base 9..11: mod_base = OTHER; note = 2'-F modification
  modified_base 12..21: mod_base = OTHER; note = 2'-Ome modification
  modified_base 1..2: mod_base = OTHER; note = Phosphorothioate connection
  modified_base 2..3: mod_base = OTHER; note = Phosphorothioate connection
  source 1..21: mol_type = other RNA
agtgtgaaaggtgctgatggc

SEQ ID NO: 1020 - RNA, 21 nt, synthetic construct
  misc_feature 1..21: note = Pt2837MW02sense
  modified_base 1..6: mod_base = OTHER; note = 2'-Ome modification
  modified_base 7: mod_base = OTHER; note = 2'-F modification
  modified_base 8: mod_base = OTHER; note = 2'-Ome modification
  modified_base 9..11: mod_base = OTHER; note = 2'-F modification
  modified_base 12..21: mod_base = OTHER; note = 2'-Ome modification
  modified_base 1..2: mod_base = OTHER; note = Phosphorothioate connection
  modified_base 2..3: mod_base = OTHER; note = Phosphorothioate connection
  source 1..21: mol_type = other RNA
gccctcatctccagctaactg

SEQ ID NO: 1021 - RNA, 21 nt, synthetic construct
  misc_feature 1..21: note = Pt2838MW02sense
  modified_base 1..6: mod_base = OTHER; note = 2'-Ome modification
  modified_base 7: mod_base = OTHER; note = 2'-F modification
  modified_base 8: mod_base = OTHER; note = 2'-Ome modification
  modified_base 9..11: mod_base = OTHER; note = 2'-F modification
  modified_base 12..21: mod_base = OTHER; note = 2'-Ome modification
  modified_base 1..2: mod_base = OTHER; note = Phosphorothioate connection
  modified_base 2..3: mod_base = OTHER; note = Phosphorothioate connection
  source 1..21: mol_type = other RNA
ccctcatctccagctaactgt

SEQ ID NO: 1022 - RNA, 21 nt, synthetic construct
  misc_feature 1..21: note = Pt2882MW02sense
  modified_base 1..6: mod_base = OTHER; note = 2'-Ome modification
  modified_base 7: mod_base = OTHER; note = 2'-F modification
  modified_base 8: mod_base = OTHER; note = 2'-Ome modification
  modified_base 9..11: mod_base = OTHER; note = 2'-F modification
  modified_base 12..21: mod_base = OTHER; note = 2'-Ome modification
  modified_base 1..2: mod_base = OTHER; note = Phosphorothioate connection
  modified_base 2..3: mod_base = OTHER; note = Phosphorothioate connection
  source 1..21: mol_type = other RNA
gattaatggaggcttagcttt

SEQ ID NO: 1023 - RNA, 21 nt, synthetic construct
  misc_feature 1..21: note = Pt2883MW02sense
  modified_base 1..6: mod_base = OTHER; note = 2'-Ome modification
  modified_base 7: mod_base = OTHER; note = 2'-F modification
  modified_base 8: mod_base = OTHER; note = 2'-Ome modification
  modified_base 9..11: mod_base = OTHER; note = 2'-F modification
  modified_base 12..21: mod_base = OTHER; note = 2'-Ome modification
  modified_base 1..2: mod_base = OTHER; note = Phosphorothioate connection
  modified_base 2..3: mod_base = OTHER; note = Phosphorothioate connection
  source 1..21: mol_type = other RNA
attaatggaggcttagctttc

SEQ ID NO: 1024 - RNA, 21 nt, synthetic construct
  misc_feature 1..21: note = Pt2888MW02sense
  modified_base 1..6: mod_base = OTHER; note = 2'-Ome modification
  modified_base 7: mod_base = OTHER; note = 2'-F modification
  modified_base 8: mod_base = OTHER; note = 2'-Ome modification
  modified_base 9..11: mod_base = OTHER; note = 2'-F modification
  modified_base 12..21: mod_base = OTHER; note = 2'-Ome modification
  modified_base 1..2: mod_base = OTHER; note = Phosphorothioate connection
  modified_base 2..3: mod_base = OTHER; note = Phosphorothioate connection
  source 1..21: mol_type = other RNA
tggaggcttagctttctggat

SEQ ID NO: 1025 - RNA, 21 nt, synthetic construct
  misc_feature 1..21: note = Pt2889MW02sense
  modified_base 1..6: mod_base = OTHER; note = 2'-Ome modification
  modified_base 7: mod_base = OTHER; note = 2'-F modification
  modified_base 8: mod_base = OTHER; note = 2'-Ome modification
  modified_base 9..11: mod_base = OTHER; note = 2'-F modification
  modified_base 12..21: mod_base = OTHER; note = 2'-Ome modification
  modified_base 1..2: mod_base = OTHER; note = Phosphorothioate connection
  modified_base 2..3: mod_base = OTHER; note = Phosphorothioate connection
  source 1..21: mol_type = other RNA
ggaggcttagctttctggatg

SEQ ID NO: 1026 - RNA, 21 nt, synthetic construct
  misc_feature 1..21: note = Pt2980MW02sense
  modified_base 1..6: mod_base = OTHER; note = 2'-Ome modification
  modified_base 7: mod_base = OTHER; note = 2'-F modification
  modified_base 8: mod_base = OTHER; note = 2'-Ome modification
  modified_base 9..11: mod_base = OTHER; note = 2'-F modification
  modified_base 12..21: mod_base = OTHER; note = 2'-Ome modification
  modified_base 1..2: mod_base = OTHER; note = Phosphorothioate connection
  modified_base 2..3: mod_base = OTHER; note = Phosphorothioate connection
  source 1..21: mol_type = other RNA
cctttactctgctctatgcca

SEQ ID NO: 1027 - RNA, 21 nt, synthetic construct
  modified_base 1..6: mod_base = OTHER; note = 2'-Ome modification
  modified_base 7: mod_base = OTHER; note = 2'-F modification
  modified_base 8: mod_base = OTHER; note = 2'-Ome modification
  modified_base 9..11: mod_base = OTHER; note = 2'-F modification
  modified_base 12..21: mod_base = OTHER; note = 2'-Ome modification
  modified_base 1..2: mod_base = OTHER; note = Phosphorothioate connection
  modified_base 2..3: mod_base = OTHER; note = Phosphorothioate connection
  misc_feature 1..21: note = Pt2991MW02sense
  source 1..21: mol_type = other RNA
ctctatgccaggctgtgctag

SEQ ID NO: 1028 - RNA, 21 nt, synthetic construct
  modified_base 1..6: mod_base = OTHER; note = 2'-Ome modification
  modified_base 7: mod_base = OTHER; note = 2'-F modification
  modified_base 8: mod_base = OTHER; note = 2'-Ome modification
  modified_base 9..11: mod_base = OTHER; note = 2'-F modification
  modified_base 12..21: mod_base = OTHER; note = 2'-Ome modification
  modified_base 1..2: mod_base = OTHER; note = Phosphorothioate connection
  modified_base 2..3: mod_base = OTHER; note = Phosphorothioate connection
  misc_feature 1..21: note = Pt3138MW02sense
  source 1..21: mol_type = other RNA
cacagaggaagaaacctggaa

SEQ ID NO: 1029 - RNA, 21 nt, synthetic construct
  misc_feature 1..21: note = Pt3139MW02sense
  modified_base 1..6: mod_base = OTHER; note = 2'-Ome modification
  modified_base 7: mod_base = OTHER; note = 2'-F modification
  modified_base 8: mod_base = OTHER; note = 2'-Ome modification
  modified_base 9..11: mod_base = OTHER; note = 2'-F modification
  modified_base 12..21: mod_base = OTHER; note = 2'-Ome modification
  modified_base 1..2: mod_base = OTHER; note = Phosphorothioate connection
  modified_base 2..3: mod_base = OTHER; note = Phosphorothioate connection
  source 1..21: mol_type = other RNA
acagaggaagaaacctggaac

SEQ ID NO: 1030 - RNA, 21 nt, synthetic construct
  misc_feature 1..21: note = Pt3141MW02sense
  modified_base 1..6: mod_base = OTHER; note = 2'-Ome modification
  modified_base 7: mod_base = OTHER; note = 2'-F modification
  modified_base 8: mod_base = OTHER; note = 2'-Ome modification
  modified_base 9..11: mod_base = OTHER; note = 2'-F modification
  modified_base 12..21: mod_base = OTHER; note = 2'-Ome modification
  modified_base 1..2: mod_base = OTHER; note = Phosphorothioate connection
  modified_base 2..3: mod_base = OTHER; note = Phosphorothioate connection
  source 1..21: mol_type = other RNA
agaggaagaaacctggaacca

SEQ ID NO: 1031 - RNA, 21 nt, synthetic construct
  misc_feature 1..21: note = Pt3185MW02sense
  modified_base 1..6: mod_base = OTHER; note = 2'-Ome modification
  modified_base 7: mod_base = OTHER; note = 2'-F modification
  modified_base 8: mod_base = OTHER; note = 2'-Ome modification
  modified_base 9..11: mod_base = OTHER; note = 2'-F modification
  modified_base 12..21: mod_base = OTHER; note = 2'-Ome modification
  modified_base 1..2: mod_base = OTHER; note = Phosphorothioate connection
  modified_base 2..3: mod_base = OTHER; note = Phosphorothioate connection
  source 1..21: mol_type = other RNA
acacagcaggaactgagccag

SEQ ID NO: 1032 - RNA, 21 nt, synthetic construct
  misc_feature 1..21: note = Pt3186MW02sense
  modified_base 1..6: mod_base = OTHER; note = 2'-Ome modification
  modified_base 7: mod_base = OTHER; note = 2'-F modification
  modified_base 8: mod_base = OTHER; note = 2'-Ome modification
  modified_base 9..11: mod_base = OTHER; note = 2'-F modification
  modified_base 12..21: mod_base = OTHER; note = 2'-Ome modification
  modified_base 1..2: mod_base = OTHER; note = Phosphorothioate connection
  modified_base 2..3: mod_base = OTHER; note = Phosphorothioate connection
  source 1..21: mol_type = other RNA
cacagcaggaactgagccaga

SEQ ID NO: 1033 - RNA, 21 nt, synthetic construct
  misc_feature 1..21: note = Pt3191MW02sense
  modified_base 1..6: mod_base = OTHER; note = 2'-Ome modification
  modified_base 7: mod_base = OTHER; note = 2'-F modification
  modified_base 8: mod_base = OTHER; note = 2'-Ome modification
  modified_base 9..11: mod_base = OTHER; note = 2'-F modification
  modified_base 12..21: mod_base = OTHER; note = 2'-Ome modification
  modified_base 1..2: mod_base = OTHER; note = Phosphorothioate connection
  modified_base 2..3: mod_base = OTHER; note = Phosphorothioate connection
  source 1..21: mol_type = other RNA
caggaactgagccagaaacgc

SEQ ID NO: 1034 - RNA, 21 nt, synthetic construct
  misc_feature 1..21: note = Pt3193MW02sense
  modified_base 1..6: mod_base = OTHER; note = 2'-Ome modification
  modified_base 7: mod_base = OTHER; note = 2'-F modification
  modified_base 8: mod_base = OTHER; note = 2'-Ome modification
  modified_base 9..11: mod_base = OTHER; note = 2'-F modification
  modified_base 12..21: mod_base = OTHER; note = 2'-Ome modification
  modified_base 1..2: mod_base = OTHER; note = Phosphorothioate connection
  modified_base 2..3: mod_base = OTHER; note = Phosphorothioate connection
  source 1..21: mol_type = other RNA
ggaactgagccagaaacgcag

SEQ ID NO: 1035 - RNA, 21 nt, synthetic construct
  misc_feature 1..21: note = Pt3194MW02sense
  source 1..21: mol_type = other RNA
  modified_base 1..6: mod_base = OTHER; note = 2'-Ome modification
  modified_base 7: mod_base = OTHER; note = 2'-F modification
  modified_base 8: mod_base = OTHER; note = 2'-Ome modification
  modified_base 9..11: mod_base = OTHER; note = 2'-F modification
  modified_base 12..21: mod_base = OTHER; note = 2'-Ome modification
  modified_base 1..2: mod_base = OTHER; note = Phosphorothioate connection
  modified_base 2..3: mod_base = OTHER; note = Phosphorothioate connection
gaactgagccagaaacgcaga

SEQ ID NO: 1036 - RNA, 21 nt, synthetic construct
  misc_feature 1..21: note = Pt3199MW02sense
  source 1..21: mol_type = other RNA
  modified_base 1..6: mod_base = OTHER; note = 2'-Ome modification
  modified_base 7: mod_base = OTHER; note = 2'-F modification
  modified_base 8: mod_base = OTHER; note = 2'-Ome modification
  modified_base 9..11: mod_base = OTHER; note = 2'-F modification
  modified_base 12..21: mod_base = OTHER; note = 2'-Ome modification
  modified_base 1..2: mod_base = OTHER; note = Phosphorothioate connection
  modified_base 2..3: mod_base = OTHER; note = Phosphorothioate connection
gagccagaaacgcagattggg

SEQ ID NO: 1037 - RNA, 21 nt, synthetic construct
  misc_feature 1..21: note = Pt3236MW02sense
  modified_base 1..6: mod_base = OTHER; note = 2'-Ome modification
  modified_base 7: mod_base = OTHER; note = 2'-F modification
  modified_base 8: mod_base = OTHER; note = 2'-Ome modification
  modified_base 9..11: mod_base = OTHER; note = 2'-F modification
  modified_base 12..21: mod_base = OTHER; note = 2'-Ome modification
  modified_base 1..2: mod_base = OTHER; note = Phosphorothioate connection
  modified_base 2..3: mod_base = OTHER; note = Phosphorothioate connection
  source 1..21: mol_type = other RNA
gcctcttcttacttcacccgg

SEQ ID NO: 1038 - RNA, 21 nt, synthetic construct
  misc_feature 1..21: note = Pt3276MW02sense
  modified_base 1..6: mod_base = OTHER; note = 2'-Ome modification
  modified_base 7: mod_base = OTHER; note = 2'-F modification
  modified_base 8: mod_base = OTHER; note = 2'-Ome modification
  modified_base 9..11: mod_base = OTHER; note = 2'-F modification
  modified_base 12..21: mod_base = OTHER; note = 2'-Ome modification
  modified_base 1..2: mod_base = OTHER; note = Phosphorothioate connection
  modified_base 2..3: mod_base = OTHER; note = Phosphorothioate connection
  source 1..21: mol_type = other RNA
gggtaacagtgaggctgggaa

SEQ ID NO: 1039 - RNA, 21 nt, synthetic construct
  misc_feature 1..21: note = Pt3304MW02sense
  modified_base 1..6: mod_base = OTHER; note = 2'-Ome modification
  modified_base 7: mod_base = OTHER; note = 2'-F modification
  modified_base 8: mod_base = OTHER; note = 2'-Ome modification
  modified_base 9..11: mod_base = OTHER; note = 2'-F modification
  modified_base 12..21: mod_base = OTHER; note = 2'-Ome modification
  modified_base 1..2: mod_base = OTHER; note = Phosphorothioate connection
  modified_base 2..3: mod_base = OTHER; note = Phosphorothioate connection
  source 1..21: mol_type = other RNA
acagaccaggaagctcggtga

SEQ ID NO: 1040 - RNA, 21 nt, synthetic construct
  misc_feature 1..21: note = Pt3315MW02sense
  modified_base 1..6: mod_base = OTHER; note = 2'-Ome modification
  modified_base 7: mod_base = OTHER; note = 2'-F modification
  modified_base 8: mod_base = OTHER; note = 2'-Ome modification
  modified_base 9..11: mod_base = OTHER; note = 2'-F modification
  modified_base 12..21: mod_base = OTHER; note = 2'-Ome modification
  modified_base 1..2: mod_base = OTHER; note = Phosphorothioate connection
  modified_base 2..3: mod_base = OTHER; note = Phosphorothioate connection
  source 1..21: mol_type = other RNA
agctcggtgagtgatggcaga

SEQ ID NO: 1041 - RNA, 21 nt, synthetic construct
  misc_feature 1..21: note = Pt3436MW02sense
  modified_base 1..6: mod_base = OTHER; note = 2'-Ome modification
  modified_base 7: mod_base = OTHER; note = 2'-F modification
  modified_base 8: mod_base = OTHER; note = 2'-Ome modification
  modified_base 9..11: mod_base = OTHER; note = 2'-F modification
  modified_base 12..21: mod_base = OTHER; note = 2'-Ome modification
  modified_base 1..2: mod_base = OTHER; note = Phosphorothioate connection
  modified_base 2..3: mod_base = OTHER; note = Phosphorothioate connection
  source 1..21: mol_type = other RNA
aactgtccctccttgagcacc

SEQ ID NO: 1042 - RNA, 21 nt, synthetic construct
  misc_feature 1..21: note = Pt3438MW02sense
  modified_base 1..6: mod_base = OTHER; note = 2'-Ome modification
  modified_base 7: mod_base = OTHER; note = 2'-F modification
  modified_base 8: mod_base = OTHER; note = 2'-Ome modification
  modified_base 9..11: mod_base = OTHER; note = 2'-F modification
  modified_base 12..21: mod_base = OTHER; note = 2'-Ome modification
  modified_base 1..2: mod_base = OTHER; note = Phosphorothioate connection
  modified_base 2..3: mod_base = OTHER; note = Phosphorothioate connection
  source 1..21: mol_type = other RNA
ctgtccctccttgagcaccag

SEQ ID NO: 1043 - RNA, 21 nt, synthetic construct
  misc_feature 1..21: note = Pt3493MW02sense
  modified_base 1..6: mod_base = OTHER; note = 2'-Ome modification
  modified_base 7: mod_base = OTHER; note = 2'-F modification
  modified_base 8: mod_base = OTHER; note = 2'-Ome modification
  modified_base 9..11: mod_base = OTHER; note = 2'-F modification
  modified_base 12..21: mod_base = OTHER; note = 2'-Ome modification
  modified_base 1..2: mod_base = OTHER; note = Phosphorothioate connection
  modified_base 2..3: mod_base = OTHER; note = Phosphorothioate connection
  source 1..21: mol_type = other RNA
tctgtcctctctgttgccttt

SEQ ID NO: 1044 - RNA, 21 nt, synthetic construct
  misc_feature 1..21: note = Pt3553MW02sense
  modified_base 1..6: mod_base = OTHER; note = 2'-Ome modification
  modified_base 7: mod_base = OTHER; note = 2'-F modification
  modified_base 8: mod_base = OTHER; note = 2'-Ome modification
  modified_base 9..11: mod_base = OTHER; note = 2'-F modification
  modified_base 12..21: mod_base = OTHER; note = 2'-Ome modification
  modified_base 1..2: mod_base = OTHER; note = Phosphorothioate connection
  modified_base 2..3: mod_base = OTHER; note = Phosphorothioate connection
  source 1..21: mol_type = other RNA
ttgaagatatttattctgggt

SEQ ID NO: 1045 - RNA, 23 nt, synthetic construct
  misc_feature 1..23: note = P3119MW02antisense
  modified_base 1: mod_base = OTHER; note = 2'-Ome modification
  modified_base 2: mod_base = OTHER; note = 2'-F modification
  modified_base 3..13: mod_base = OTHER; note = 2'-Ome modification
  modified_base 14: mod_base = OTHER; note = 2'-F modification
  modified_base 15: mod_base = OTHER; note = 2'-Ome modification
  modified_base 16: mod_base = OTHER; note = 2'-F modification
  modified_base 17..23: mod_base = OTHER; note = 2'-Ome modification
  modified_base 1..2: mod_base = OTHER; note = Phosphorothioate connection
  modified_base 2..3: mod_base = OTHER; note = Phosphorothioate connection
  modified_base 21..22: mod_base = OTHER; note = Phosphorothioate connection
  modified_base 22..23: mod_base = OTHER; note = Phosphorothioate connection
  source 1..23: mol_type = other RNA
tgaagtaggggtgcgaatgtgta

SEQ ID NO: 1046 - RNA, 23 nt, synthetic construct
  misc_feature 1..23: note = P3196MW02antisense
  modified_base 1: mod_base = OTHER; note = 2'-Ome modification
  modified_base 2: mod_base = OTHER; note = 2'-F modification
  modified_base 3..13: mod_base = OTHER; note = 2'-Ome modification
  modified_base 14: mod_base = OTHER; note = 2'-F modification
  modified_base 15: mod_base = OTHER; note = 2'-Ome modification
  modified_base 16: mod_base = OTHER; note = 2'-F modification
  modified_base 17..23: mod_base = OTHER; note = 2'-Ome modification
  modified_base 1..2: mod_base = OTHER; note = Phosphorothioate connection
  modified_base 2..3: mod_base = OTHER; note = Phosphorothioate connection
  modified_base 21..22: mod_base = OTHER; note = Phosphorothioate connection
  modified_base 22..23: mod_base = OTHER; note = Phosphorothioate connection
  source 1..23: mol_type = other RNA
aatctgcgtttctggctcagttc

SEQ ID NO: 1047 - RNA, 23 nt, synthetic construct
  misc_feature 1..23: note = P3464MW02antisense
  modified_base 1: mod_base = OTHER; note = 2'-Ome modification
  modified_base 2: mod_base = OTHER; note = 2'-F modification
  modified_base 3..13: mod_base = OTHER; note = 2'-Ome modification
  modified_base 14: mod_base = OTHER; note = 2'-F modification
  modified_base 15: mod_base = OTHER; note = 2'-Ome modification
  modified_base 16: mod_base = OTHER; note = 2'-F modification
  modified_base 17..23: mod_base = OTHER; note = 2'-Ome modification
  modified_base 1..2: mod_base = OTHER; note = Phosphorothioate connection
  modified_base 2..3: mod_base = OTHER; note = Phosphorothioate connection
  modified_base 21..22: mod_base = OTHER; note = Phosphorothioate connection
  modified_base 22..23: mod_base = OTHER; note = Phosphorothioate connection
  source 1..23: mol_type = other RNA
ataaatgtctgcttgcttgggtg

SEQ ID NO: 1048 - RNA, 23 nt, synthetic construct
  misc_feature 1..23: note = P3543MW02antisense
  modified_base 1: mod_base = OTHER; note = 2'-Ome modification
  modified_base 2: mod_base = OTHER; note = 2'-F modification
  modified_base 3..13: mod_base = OTHER; note = 2'-Ome modification
  modified_base 14: mod_base = OTHER; note = 2'-F modification
  modified_base 15: mod_base = OTHER; note = 2'-Ome modification
  modified_base 16: mod_base = OTHER; note = 2'-F modification
  modified_base 17..23: mod_base = OTHER; note = 2'-Ome modification
  modified_base 1..2: mod_base = OTHER; note = Phosphorothioate connection
  modified_base 2..3: mod_base = OTHER; note = Phosphorothioate connection
  modified_base 21..22: mod_base = OTHER; note = Phosphorothioate connection
  modified_base 22..23: mod_base = OTHER; note = Phosphorothioate connection
  source 1..23: mol_type = other RNA
aatatcttcaagttacaaaagca

SEQ ID NO: 1049 - RNA, 23 nt, synthetic construct
  misc_feature 1..23: note = P3554MW02antisense
  modified_base 1: mod_base = OTHER; note = 2'-Ome modification
  modified_base 2: mod_base = OTHER; note = 2'-F modification
  modified_base 3..13: mod_base = OTHER; note = 2'-Ome modification
  modified_base 14: mod_base = OTHER; note = 2'-F modification
  modified_base 15: mod_base = OTHER; note = 2'-Ome modification
  modified_base 16: mod_base = OTHER; note = 2'-F modification
  modified_base 17..23: mod_base = OTHER; note = 2'-Ome modification
  modified_base 1..2: mod_base = OTHER; note = Phosphorothioate connection
  modified_base 2..3: mod_base = OTHER; note = Phosphorothioate connection
  modified_base 21..22: mod_base = OTHER; note = Phosphorothioate connection
  modified_base 22..23: mod_base = OTHER; note = Phosphorothioate connection
  source 1..23: mol_type = other RNA
aacccagaataaatatcttcaag

SEQ ID NO: 1050 - RNA, 23 nt, synthetic construct
  misc_feature 1..23: note = SP340MW02antisense
  modified_base 1: mod_base = OTHER; note = 2'-Ome modification
  modified_base 2: mod_base = OTHER; note = 2'-F modification
  modified_base 3..13: mod_base = OTHER; note = 2'-Ome modification
  modified_base 14: mod_base = OTHER; note = 2'-F modification
  modified_base 15: mod_base = OTHER; note = 2'-Ome modification
  modified_base 16: mod_base = OTHER; note = 2'-F modification
  modified_base 17..23: mod_base = OTHER; note = 2'-Ome modification
  modified_base 1..2: mod_base = OTHER; note = Phosphorothioate connection
  modified_base 2..3: mod_base = OTHER; note = Phosphorothioate connection
  modified_base 21..22: mod_base = OTHER; note = Phosphorothioate connection
  modified_base 22..23: mod_base = OTHER; note = Phosphorothioate connection
  source 1..23: mol_type = other RNA
aacaggtctagaaaagttggctg

SEQ ID NO: 1051 - RNA, 23 nt, synthetic construct
  misc_feature 1..23: note = SP341MW02antisense
  modified_base 1: mod_base = OTHER; note = 2'-Ome modification
  modified_base 2: mod_base = OTHER; note = 2'-F modification
  modified_base 3..13: mod_base = OTHER; note = 2'-Ome modification
  modified_base 14: mod_base = OTHER; note = 2'-F modification
  modified_base 15: mod_base = OTHER; note = 2'-Ome modification
  modified_base 16: mod_base = OTHER; note = 2'-F modification
  modified_base 17..23: mod_base = OTHER; note = 2'-Ome modification
  modified_base 1..2: mod_base = OTHER; note = Phosphorothioate connection
  modified_base 2..3: mod_base = OTHER; note = Phosphorothioate connection
  modified_base 21..22: mod_base = OTHER; note = Phosphorothioate connection
  modified_base 22..23: mod_base = OTHER; note = Phosphorothioate connection
  source 1..23: mol_type = other RNA
aaacaggtctagaaaagttggct

SEQ ID NO: 1052 - RNA, 23 nt, synthetic construct
  misc_feature 1..23: note = SP342MW02antisense
  modified_base 1: mod_base = OTHER; note = 2'-Ome modification
  modified_base 2: mod_base = OTHER; note = 2'-F modification
  modified_base 3..13: mod_base = OTHER; note = 2'-Ome modification
  modified_base 14: mod_base = OTHER; note = 2'-F modification
  modified_base 15: mod_base = OTHER; note = 2'-Ome modification
  modified_base 16: mod_base = OTHER; note = 2'-F modification
  modified_base 17..23: mod_base = OTHER; note = 2'-Ome modification
  modified_base 1..2: mod_base = OTHER; note = Phosphorothioate connection
  modified_base 2..3: mod_base = OTHER; note = Phosphorothioate connection
  modified_base 21..22: mod_base = OTHER; note = Phosphorothioate connection
  modified_base 22..23: mod_base = OTHER; note = Phosphorothioate connection
  source 1..23: mol_type = other RNA
aaaacaggtctagaaaagttggc

SEQ ID NO: 1053 - RNA, 23 nt, synthetic construct
  misc_feature 1..23: note = SP344MW02antisense
  modified_base 1: mod_base = OTHER; note = 2'-Ome modification
  modified_base 2: mod_base = OTHER; note = 2'-F modification
  modified_base 3..13: mod_base = OTHER; note = 2'-Ome modification
  modified_base 14: mod_base = OTHER; note = 2'-F modification
  modified_base 15: mod_base = OTHER; note = 2'-Ome modification
  modified_base 16: mod_base = OTHER; note = 2'-F modification
  modified_base 17..23: mod_base = OTHER; note = 2'-Ome modification
  modified_base 1..2: mod_base = OTHER; note = Phosphorothioate connection
  modified_base 2..3: mod_base = OTHER; note = Phosphorothioate connection
  modified_base 21..22: mod_base = OTHER; note = Phosphorothioate connection
  modified_base 22..23: mod_base = OTHER; note = Phosphorothioate connection
  source 1..23: mol_type = other RNA
gcaaaacaggtctagaaaagttg

SEQ ID NO: 1054 - RNA, 23 nt, synthetic construct
  misc_feature 1..23: note = SP345MW02antisense
  modified_base 1: mod_base = OTHER; note = 2'-Ome modification
  modified_base 2: mod_base = OTHER; note = 2'-F modification
  modified_base 3..13: mod_base = OTHER; note = 2'-Ome modification
  modified_base 14: mod_base = OTHER; note = 2'-F modification
  modified_base 15: mod_base = OTHER; note = 2'-Ome modification
  modified_base 16: mod_base = OTHER; note = 2'-F modification
  modified_base 17..23: mod_base = OTHER; note = 2'-Ome modification
  modified_base 1..2: mod_base = OTHER; note = Phosphorothioate connection
  modified_base 2..3: mod_base = OTHER; note = Phosphorothioate connection
  modified_base 21..22: mod_base = OTHER; note = Phosphorothioate connection
  modified_base 22..23: mod_base = OTHER; note = Phosphorothioate connection
  source 1..23: mol_type = other RNA
agcaaaacaggtctagaaaagtt

SEQ ID NO: 1055 - RNA, 23 nt, synthetic construct
  misc_feature 1..23: note = SP349MW02antisense
  modified_base 1: mod_base = OTHER; note = 2'-Ome modification
  modified_base 2: mod_base = OTHER; note = 2'-F modification
  modified_base 3..13: mod_base = OTHER; note = 2'-Ome modification
  modified_base 14: mod_base = OTHER; note = 2'-F modification
  modified_base 15: mod_base = OTHER; note = 2'-Ome modification
  modified_base 16: mod_base = OTHER; note = 2'-F modification
  modified_base 17..23: mod_base = OTHER; note = 2'-Ome modification
  modified_base 1..2: mod_base = OTHER; note = Phosphorothioate connection
  modified_base 2..3: mod_base = OTHER; note = Phosphorothioate connection
  modified_base 21..22: mod_base = OTHER; note = Phosphorothioate connection
  modified_base 22..23: mod_base = OTHER; note = Phosphorothioate connection
  source 1..23: mol_type = other RNA
caaaagcaaaacaggtctagaaa

SEQ ID NO: 1056 - RNA, 23 nt, synthetic construct
  misc_feature 1..23: note = SP351MW02antisense
  modified_base 1: mod_base = OTHER; note = 2'-Ome modification
  modified_base 2: mod_base = OTHER; note = 2'-F modification
  modified_base 3..13: mod_base = OTHER; note = 2'-Ome modification
  modified_base 14: mod_base = OTHER; note = 2'-F modification
  modified_base 15: mod_base = OTHER; note = 2'-Ome modification
  modified_base 16: mod_base = OTHER; note = 2'-F modification
  modified_base 17..23: mod_base = OTHER; note = 2'-Ome modification
  modified_base 1..2: mod_base = OTHER; note = Phosphorothioate connection
  modified_base 2..3: mod_base = OTHER; note = Phosphorothioate connection
  modified_base 21..22: mod_base = OTHER; note = Phosphorothioate connection
  modified_base 22..23: mod_base = OTHER; note = Phosphorothioate connection
  source 1..23: mol_type = other RNA
ttacaaaagcaaaacaggtctag

SEQ ID NO: 1057 - RNA, 23 nt, synthetic construct
  misc_feature 1..23: note = WP3239MW02antisense
  modified_base 1: mod_base = OTHER; note = 2'-Ome modification
  modified_base 2: mod_base = OTHER; note = 2'-F modification
  modified_base 3..13: mod_base = OTHER; note = 2'-Ome modification
  modified_base 14: mod_base = OTHER; note = 2'-F modification
  modified_base 15: mod_base = OTHER; note = 2'-Ome modification
  modified_base 16: mod_base = OTHER; note = 2'-F modification
  modified_base 17..23: mod_base = OTHER; note = 2'-Ome modification
  modified_base 1..2: mod_base = OTHER; note = Phosphorothioate connection
  modified_base 2..3: mod_base = OTHER; note = Phosphorothioate connection
  modified_base 21..22: mod_base = OTHER; note = Phosphorothioate connection
  modified_base 22..23: mod_base = OTHER; note = Phosphorothioate connection
  source 1..23: mol_type = other RNA
taggggtgcgaatgtgtaccctg

SEQ ID NO: 1058 - RNA, 23 nt, synthetic construct
  misc_feature 1..23: note = WP3262MW02antisense
  modified_base 1: mod_base = OTHER; note = 2'-Ome modification
  modified_base 2: mod_base = OTHER; note = 2'-F modification
  modified_base 3..13: mod_base = OTHER; note = 2'-Ome modification
  modified_base 14: mod_base = OTHER; note = 2'-F modification
  modified_base 15: mod_base = OTHER; note = 2'-Ome modification
  modified_base 16: mod_base = OTHER; note = 2'-F modification
  modified_base 17..23: mod_base = OTHER; note = 2'-Ome modification
  modified_base 1..2: mod_base = OTHER; note = Phosphorothioate connection
  modified_base 2..3: mod_base = OTHER; note = Phosphorothioate connection
  modified_base 21..22: mod_base = OTHER; note = Phosphorothioate connection
  modified_base 22..23: mod_base = OTHER; note = Phosphorothioate connection
  source 1..23: mol_type = other RNA
tccaggtttcttcctctgtgaag

SEQ ID NO: 1059 - RNA, 23 nt, synthetic construct
  misc_feature 1..23: note = WP3315MW02antisense
  modified_base 1: mod_base = OTHER; note = 2'-Ome modification
  modified_base 2: mod_base = OTHER; note = 2'-F modification
  modified_base 3..13: mod_base = OTHER; note = 2'-Ome modification
  modified_base 14: mod_base = OTHER; note = 2'-F modification
  modified_base 15: mod_base = OTHER; note = 2'-Ome modification
  modified_base 16: mod_base = OTHER; note = 2'-F modification
  modified_base 17..23: mod_base = OTHER; note = 2'-Ome modification
  modified_base 1..2: mod_base = OTHER; note = Phosphorothioate connection
  modified_base 2..3: mod_base = OTHER; note = Phosphorothioate connection
  modified_base 21..22: mod_base = OTHER; note = Phosphorothioate connection
  modified_base 22..23: mod_base = OTHER; note = Phosphorothioate connection
  source 1..23: mol_type = other RNA
cgtttctggctcagttcctgctg

SEQ ID NO: 1060 - RNA, 23 nt, synthetic construct
  misc_feature 1..23: note = WP3315-AMW02antisense
  modified_base 1: mod_base = OTHER; note = 2'-Ome modification
  modified_base 2: mod_base = OTHER; note = 2'-F modification
  modified_base 3..13: mod_base = OTHER; note = 2'-Ome modification
  modified_base 14: mod_base = OTHER; note = 2'-F modification
  modified_base 15: mod_base = OTHER; note = 2'-Ome modification
  modified_base 16: mod_base = OTHER; note = 2'-F modification
  modified_base 17..23: mod_base = OTHER; note = 2'-Ome modification
  modified_base 1..2: mod_base = OTHER; note = Phosphorothioate connection
  modified_base 2..3: mod_base = OTHER; note = Phosphorothioate connection
  modified_base 21..22: mod_base = OTHER; note = Phosphorothioate connection
  modified_base 22..23: mod_base = OTHER; note = Phosphorothioate connection
  source 1..23: mol_type = other RNA
tgtttctggctcagttcctgctg

SEQ ID NO: 1061 - RNA, 23 nt, synthetic construct
  misc_feature 1..23: note = WP3323MW02antisense
  modified_base 1: mod_base = OTHER; note = 2'-Ome modification
  modified_base 2: mod_base = OTHER; note = 2'-F modification
  modified_base 3..13: mod_base = OTHER; note = 2'-Ome modification
  modified_base 14: mod_base = OTHER; note = 2'-F modification
  modified_base 15: mod_base = OTHER; note = 2'-Ome modification
  modified_base 16: mod_base = OTHER; note = 2'-F modification
  modified_base 17..23: mod_base = OTHER; note = 2'-Ome modification
  modified_base 1..2: mod_base = OTHER; note = Phosphorothioate connection
  modified_base 2..3: mod_base = OTHER; note = Phosphorothioate connection
  modified_base 21..22: mod_base = OTHER; note = Phosphorothioate connection
  modified_base 22..23: mod_base = OTHER; note = Phosphorothioate connection
  source 1..23: mol_type = other RNA
actgagccagaaacgcagattgg

SEQ ID NO: 1062 - RNA, 23 nt, synthetic construct
  misc_feature 1..23: note = Pt609MW02antisense
  modified_base 1: mod_base = OTHER; note = 2'-Ome modification
  modified_base 2: mod_base = OTHER; note = 2'-F modification
  modified_base 3..13: mod_base = OTHER; note = 2'-Ome modification
  modified_base 14: mod_base = OTHER; note = 2'-F modification
  modified_base 15: mod_base = OTHER; note = 2'-Ome modification
  modified_base 16: mod_base = OTHER; note = 2'-F modification
  modified_base 17..23: mod_base = OTHER; note = 2'-Ome modification
  modified_base 1..2: mod_base = OTHER; note = Phosphorothioate connection
  modified_base 2..3: mod_base = OTHER; note = Phosphorothioate connection
  modified_base 21..22: mod_base = OTHER; note = Phosphorothioate connection
  modified_base 22..23: mod_base = OTHER; note = Phosphorothioate connection
  source 1..23: mol_type = other RNA
acatgcaggatcttggtgaggta

SEQ ID NO: 1063 - RNA, 23 nt, synthetic construct
  misc_feature 1..23: note = Pt890MW02antisense
  modified_base 1: mod_base = OTHER; note = 2'-Ome modification
  modified_base 2: mod_base = OTHER; note = 2'-F modification
  modified_base 3..13: mod_base = OTHER; note = 2'-Ome modification
  modified_base 14: mod_base = OTHER; note = 2'-F modification
  modified_base 15: mod_base = OTHER; note = 2'-Ome modification
  modified_base 16: mod_base = OTHER; note = 2'-F modification
  modified_base 17..23: mod_base = OTHER; note = 2'-Ome modification
  modified_base 1..2: mod_base = OTHER; note = Phosphorothioate connection
  modified_base 2..3: mod_base = OTHER; note = Phosphorothioate connection
  modified_base 21..22: mod_base = OTHER; note = Phosphorothioate connection
  modified_base 22..23: mod_base = OTHER; note = Phosphorothioate connection
  source 1..23: mol_type = other RNA
cattctcgaagtcggtgaccatg

SEQ ID NO: 1064 - RNA, 23 nt, synthetic construct
  misc_feature 1..23: note = Pt2530MW02antisense
  modified_base 1: mod_base = OTHER; note = 2'-Ome modification
  modified_base 2: mod_base = OTHER; note = 2'-F modification
  modified_base 3..13: mod_base = OTHER; note = 2'-Ome modification
  modified_base 14: mod_base = OTHER; note = 2'-F modification
  modified_base 15: mod_base = OTHER; note = 2'-Ome modification
  modified_base 16: mod_base = OTHER; note = 2'-F modification
  modified_base 17..23: mod_base = OTHER; note = 2'-Ome modification
  modified_base 1..2: mod_base = OTHER; note = Phosphorothioate connection
  modified_base 2..3: mod_base = OTHER; note = Phosphorothioate connection
  modified_base 21..22: mod_base = OTHER; note = Phosphorothioate connection
  modified_base 22..23: mod_base = OTHER; note = Phosphorothioate connection
  source 1..23: mol_type = other RNA
agtgagttccaggcaaggaggct

SEQ ID NO: 1065 - RNA, 23 nt, synthetic construct
  misc_feature 1..23: note = Pt2532MW02antisense
  modified_base 1: mod_base = OTHER; note = 2'-Ome modification
  modified_base 2: mod_base = OTHER; note = 2'-F modification
  modified_base 3..13: mod_base = OTHER; note = 2'-Ome modification
  modified_base 14: mod_base = OTHER; note = 2'-F modification
  modified_base 15: mod_base = OTHER; note = 2'-Ome modification
  modified_base 16: mod_base = OTHER; note = 2'-F modification
  modified_base 17..23: mod_base = OTHER; note = 2'-Ome modification
  modified_base 1..2: mod_base = OTHER; note = Phosphorothioate connection
  modified_base 2..3: mod_base = OTHER; note = Phosphorothioate connection
  modified_base 21..22: mod_base = OTHER; note = Phosphorothioate connection
  modified_base 22..23: mod_base = OTHER; note = Phosphorothioate connection
  source 1..23: mol_type = other RNA
tgagtgagttccaggcaaggagg

SEQ ID NO: 1066 - RNA, 23 nt, synthetic construct
  misc_feature 1..23: note = Pt2533MW02antisense
  source 1..23: mol_type = other RNA
  modified_base 1: mod_base = OTHER; note = 2'-Ome modification
  modified_base 2: mod_base = OTHER; note = 2'-F modification
  modified_base 3..13: mod_base = OTHER; note = 2'-Ome modification
  modified_base 14: mod_base = OTHER; note = 2'-F modification
  modified_base 15: mod_base = OTHER; note = 2'-Ome modification
  modified_base 16: mod_base = OTHER; note = 2'-F modification
  modified_base 17..23: mod_base = OTHER; note = 2'-Ome modification
  modified_base 1..2: mod_base = OTHER; note = Phosphorothioate connection
  modified_base 2..3: mod_base = OTHER; note = Phosphorothioate connection
  modified_base 21..22: mod_base = OTHER; note = Phosphorothioate connection
  modified_base 22..23: mod_base = OTHER; note = Phosphorothioate connection
gtgagtgagttccaggcaaggag

SEQ ID NO: 1067 - RNA, 23 nt, synthetic construct
  misc_feature 1..23: note = Pt2534MW02antisense
  modified_base 1: mod_base = OTHER; note = 2'-Ome modification
  modified_base 2: mod_base = OTHER; note = 2'-F modification
  modified_base 3..13: mod_base = OTHER; note = 2'-Ome modification
  modified_base 14: mod_base = OTHER; note = 2'-F modification
  modified_base 15: mod_base = OTHER; note = 2'-Ome modification
  modified_base 16: mod_base = OTHER; note = 2'-F modification
  modified_base 17..23: mod_base = OTHER; note = 2'-Ome modification
  modified_base 1..2: mod_base = OTHER; note = Phosphorothioate connection
  modified_base 2..3: mod_base = OTHER; note = Phosphorothioate connection
  modified_base 21..22: mod_base = OTHER; note = Phosphorothioate connection
  modified_base 22..23: mod_base = OTHER; note = Phosphorothioate connection
  source 1..23: mol_type = other RNA
agtgagtgagttccaggcaagga

SEQ ID NO: 1068 - RNA, 23 nt, synthetic construct
  misc_feature 1..23: note = Pt2536MW02antisense
  modified_base 1: mod_base = OTHER; note = 2'-Ome modification
  modified_base 2: mod_base = OTHER; note = 2'-F modification
  modified_base 3..13: mod_base = OTHER; note = 2'-Ome modification
  modified_base 14: mod_base = OTHER; note = 2'-F modification
  modified_base 15: mod_base = OTHER; note = 2'-Ome modification
  modified_base 16: mod_base = OTHER; note = 2'-F modification
  modified_base 17..23: mod_base = OTHER; note = 2'-Ome modification
  modified_base 1..2: mod_base = OTHER; note = Phosphorothioate connection
  modified_base 2..3: mod_base = OTHER; note = Phosphorothioate connection
  modified_base 21..22: mod_base = OTHER; note = Phosphorothioate connection
  modified_base 22..23: mod_base = OTHER; note = Phosphorothioate connection
  source 1..23: mol_type = other RNA
agagtgagtgagttccaggcaag

SEQ ID NO: 1069 - RNA, 23 nt, synthetic construct
  misc_feature 1..23: note = Pt2538MW02antisense
  modified_base 1: mod_base = OTHER; note = 2'-Ome modification
  modified_base 2: mod_base = OTHER; note = 2'-F modification
  modified_base 3..13: mod_base = OTHER; note = 2'-Ome modification
  modified_base 14: mod_base = OTHER; note = 2'-F modification
  modified_base 15: mod_base = OTHER; note = 2'-Ome modification
  modified_base 16: mod_base = OTHER; note = 2'-F modification
  modified_base 17..23: mod_base = OTHER; note = 2'-Ome modification
  modified_base 1..2: mod_base = OTHER; note = Phosphorothioate connection
  modified_base 2..3: mod_base = OTHER; note = Phosphorothioate connection
  modified_base 21..22: mod_base = OTHER; note = Phosphorothioate connection
  modified_base 22..23: mod_base = OTHER; note = Phosphorothioate connection
  source 1..23: mol_type = other RNA
ccagagtgagtgagttccaggca

SEQ ID NO: 1070 - RNA, 23 nt, synthetic construct
  misc_feature 1..23: note = Pt2541MW02antisense
  modified_base 1: mod_base = OTHER; note = 2'-Ome modification
  modified_base 2: mod_base = OTHER; note = 2'-F modification
  modified_base 3..13: mod_base = OTHER; note = 2'-Ome modification
  modified_base 14: mod_base = OTHER; note = 2'-F modification
  modified_base 15: mod_base = OTHER; note = 2'-Ome modification
  modified_base 16: mod_base = OTHER; note = 2'-F modification
  modified_base 17..23: mod_base = OTHER; note = 2'-Ome modification
  modified_base 1..2: mod_base = OTHER; note = Phosphorothioate connection
  modified_base 2..3: mod_base = OTHER; note = Phosphorothioate connection
  modified_base 21..22: mod_base = OTHER; note = Phosphorothioate connection
  modified_base 22..23: mod_base = OTHER; note = Phosphorothioate connection
  source 1..23: mol_type = other RNA
cacccagagtgagtgagttccag

SEQ ID NO: 1071 - RNA, 23 nt, synthetic construct
  misc_feature 1..23: note = Pt2612MW02antisense
  modified_base 1: mod_base = OTHER; note = 2'-Ome modification
  modified_base 2: mod_base = OTHER; note = 2'-F modification
  modified_base 3..13: mod_base = OTHER; note = 2'-Ome modification
  modified_base 14: mod_base = OTHER; note = 2'-F modification
  modified_base 15: mod_base = OTHER; note = 2'-Ome modification
  modified_base 16: mod_base = OTHER; note = 2'-F modification
  modified_base 17..23: mod_base = OTHER; note = 2'-Ome modification
  modified_base 1..2: mod_base = OTHER; note = Phosphorothioate connection
  modified_base 2..3: mod_base = OTHER; note = Phosphorothioate connection
  modified_base 21..22: mod_base = OTHER; note = Phosphorothioate connection
  modified_base 22..23: mod_base = OTHER; note = Phosphorothioate connection
  source 1..23: mol_type = other RNA
gacctgtttgaatggtgaaatgc

SEQ ID NO: 1072 - RNA, 23 nt, synthetic construct
  misc_feature 1..23: note = Pt2675MW02antisense
  modified_base 1: mod_base = OTHER; note = 2'-Ome modification
  modified_base 2: mod_base = OTHER; note = 2'-F modification
  modified_base 3..13: mod_base = OTHER; note = 2'-Ome modification
  modified_base 14: mod_base = OTHER; note = 2'-F modification
  modified_base 15: mod_base = OTHER; note = 2'-Ome modification
  modified_base 16: mod_base = OTHER; note = 2'-F modification
  modified_base 17..23: mod_base = OTHER; note = 2'-Ome modification
  modified_base 1..2: mod_base = OTHER; note = Phosphorothioate connection
  modified_base 2..3: mod_base = OTHER; note = Phosphorothioate connection
  modified_base 21..22: mod_base = OTHER; note = Phosphorothioate connection
  modified_base 22..23: mod_base = OTHER; note = Phosphorothioate connection
  source 1..23: mol_type = other RNA
aaagtcattctgcccacggacat

SEQ ID NO: 1073 - RNA, 23 nt, synthetic construct
  misc_feature 1..23: note = Pt2697MW02antisense
  modified_base 1: mod_base = OTHER; note = 2'-Ome modification
  modified_base 2: mod_base = OTHER; note = 2'-F modification
  modified_base 3..13: mod_base = OTHER; note = 2'-Ome modification
  modified_base 14: mod_base = OTHER; note = 2'-F modification
  modified_base 15: mod_base = OTHER; note = 2'-Ome modification
  modified_base 16: mod_base = OTHER; note = 2'-F modification
  modified_base 17..23: mod_base = OTHER; note = 2'-Ome modification
  modified_base 1..2: mod_base = OTHER; note = Phosphorothioate connection
  modified_base 2..3: mod_base = OTHER; note = Phosphorothioate connection
  modified_base 21..22: mod_base = OTHER; note = Phosphorothioate connection
  modified_base 22..23: mod_base = OTHER; note = Phosphorothioate connection
  source 1..23: mol_type = other RNA
ggcacggaacaagagctcaataa

SEQ ID NO: 1074 - RNA, 23 nt, synthetic construct
  misc_feature 1..23: note = Pt2698MW02antisense
  modified_base 1: mod_base = OTHER; note = 2'-Ome modification
  modified_base 2: mod_base = OTHER; note = 2'-F modification
  modified_base 3..13: mod_base = OTHER; note = 2'-Ome modification
  modified_base 14: mod_base = OTHER; note = 2'-F modification
  modified_base 15: mod_base = OTHER; note = 2'-Ome modification
  modified_base 16: mod_base = OTHER; note = 2'-F modification
  modified_base 17..23: mod_base = OTHER; note = 2'-Ome modification
  modified_base 1..2: mod_base = OTHER; note = Phosphorothioate connection
  modified_base 2..3: mod_base = OTHER; note = Phosphorothioate connection
  modified_base 21..22: mod_base = OTHER; note = Phosphorothioate connection
  modified_base 22..23: mod_base = OTHER; note = Phosphorothioate connection
  source 1..23: mol_type = other RNA
tggcacggaacaagagctcaata

SEQ ID NO: 1075 - RNA, 23 nt, synthetic construct
  misc_feature 1..23: note = Pt2699MW02antisense
  modified_base 1: mod_base = OTHER; note = 2'-Ome modification
  modified_base 2: mod_base = OTHER; note = 2'-F modification
  modified_base 3..13: mod_base = OTHER; note = 2'-Ome modification
  modified_base 14: mod_base = OTHER; note = 2'-F modification
  modified_base 15: mod_base = OTHER; note = 2'-Ome modification
  modified_base 16: mod_base = OTHER; note = 2'-F modification
  modified_base 17..23: mod_base = OTHER; note = 2'-Ome modification
  modified_base 1..2: mod_base = OTHER; note = Phosphorothioate connection
  modified_base 2..3: mod_base = OTHER; note = Phosphorothioate connection
  modified_base 21..22: mod_base = OTHER; note = Phosphorothioate connection
  modified_base 22..23: mod_base = OTHER; note = Phosphorothioate connection
  source 1..23: mol_type = other RNA
ctggcacggaacaagagctcaat

SEQ ID NO: 1076 - RNA, 23 nt, synthetic construct
  misc_feature 1..23: note = Pt2700MW02antisense
  modified_base 1: mod_base = OTHER; note = 2'-Ome modification
  modified_base 2: mod_base = OTHER; note = 2'-F modification
  modified_base 3..13: mod_base = OTHER; note = 2'-Ome modification
  modified_base 14: mod_base = OTHER; note = 2'-F modification
  modified_base 15: mod_base = OTHER; note = 2'-Ome modification
  modified_base 16: mod_base = OTHER; note = 2'-F modification
  modified_base 17..23: mod_base = OTHER; note = 2'-Ome modification
  modified_base 1..2: mod_base = OTHER; note = Phosphorothioate connection
  modified_base 2..3: mod_base = OTHER; note = Phosphorothioate connection
  modified_base 21..22: mod_base = OTHER; note = Phosphorothioate connection
  modified_base 22..23: mod_base = OTHER; note = Phosphorothioate connection
  source 1..23: mol_type = other RNA
cctggcacggaacaagagctcaa

SEQ ID NO: 1077 - RNA, 23 nt, synthetic construct
  misc_feature 1..23: note = Pt2717MW02antisense
  modified_base 1: mod_base = OTHER; note = 2'-Ome modification
  modified_base 2: mod_base = OTHER; note = 2'-F modification
  modified_base 3..13: mod_base = OTHER; note = 2'-Ome modification
  modified_base 14: mod_base = OTHER; note = 2'-F modification
  modified_base 15: mod_base = OTHER; note = 2'-Ome modification
  modified_base 16: mod_base = OTHER; note = 2'-F modification
  modified_base 17..23: mod_base = OTHER; note = 2'-Ome modification
  modified_base 1..2: mod_base = OTHER; note = Phosphorothioate connection
  modified_base 2..3: mod_base = OTHER; note = Phosphorothioate connection
  modified_base 21..22: mod_base = OTHER; note = Phosphorothioate connection
  modified_base 22..23: mod_base = OTHER; note = Phosphorothioate connection
  source 1..23: mol_type = other RNA
gacctgaggattgaatgcctggc

SEQ ID NO: 1078 - RNA, 23 nt, synthetic construct
  misc_feature 1..23: note = Pt2727MW02antisense
  modified_base 1: mod_base = OTHER; note = 2'-Ome modification
  modified_base 2: mod_base = OTHER; note = 2'-F modification
  modified_base 3..13: mod_base = OTHER; note = 2'-Ome modification
  modified_base 14: mod_base = OTHER; note = 2'-F modification
  modified_base 15: mod_base = OTHER; note = 2'-Ome modification
  modified_base 16: mod_base = OTHER; note = 2'-F modification
  modified_base 17..23: mod_base = OTHER; note = 2'-Ome modification
  modified_base 1..2: mod_base = OTHER; note = Phosphorothioate connection
  modified_base 2..3: mod_base = OTHER; note = Phosphorothioate connection
  modified_base 21..22: mod_base = OTHER; note = Phosphorothioate connection
  modified_base 22..23: mod_base = OTHER; note = Phosphorothioate connection
  source 1..23: mol_type = other RNA
ccttggtggagacctgaggattg

SEQ ID NO: 1079 - RNA, 23 nt, synthetic construct
  misc_feature 1..23: note = Pt2748MW02antisense
  modified_base 1: mod_base = OTHER; note = 2'-Ome modification
  modified_base 2: mod_base = OTHER; note = 2'-F modification
  modified_base 3..13: mod_base = OTHER; note = 2'-Ome modification
  modified_base 14: mod_base = OTHER; note = 2'-F modification
  modified_base 15: mod_base = OTHER; note = 2'-Ome modification
  modified_base 16: mod_base = OTHER; note = 2'-F modification
  modified_base 17..23: mod_base = OTHER; note = 2'-Ome modification
  modified_base 1..2: mod_base = OTHER; note = Phosphorothioate connection
  modified_base 2..3: mod_base = OTHER; note = Phosphorothioate connection
  modified_base 21..22: mod_base = OTHER; note = Phosphorothioate connection
  modified_base 22..23: mod_base = OTHER; note = Phosphorothioate connection
  source 1..23: mol_type = other RNA
tccatgggaagaatcctgcctcc

SEQ ID NO: 1080 - RNA, 23 nt, synthetic construct
  misc_feature 1..23: note = Pt2750MW02antisense
  modified_base 1: mod_base = OTHER; note = 2'-Ome modification
  modified_base 2: mod_base = OTHER; note = 2'-F modification
  modified_base 3..13: mod_base = OTHER; note = 2'-Ome modification
  modified_base 14: mod_base = OTHER; note = 2'-F modification
  modified_base 15: mod_base = OTHER; note = 2'-Ome modification
  modified_base 16: mod_base = OTHER; note = 2'-F modification
  modified_base 17..23: mod_base = OTHER; note = 2'-Ome modification
  modified_base 1..2: mod_base = OTHER; note = Phosphorothioate connection
  modified_base 2..3: mod_base = OTHER; note = Phosphorothioate connection
  modified_base 21..22: mod_base = OTHER; note = Phosphorothioate connection
  modified_base 22..23: mod_base = OTHER; note = Phosphorothioate connection
  source 1..23: mol_type = other RNA
tatccatgggaagaatcctgcct

SEQ ID NO: 1081 - RNA, 23 nt, synthetic construct
  misc_feature 1..23: note = Pt2752MW02antisense
  modified_base 1: mod_base = OTHER; note = 2'-Ome modification
  modified_base 2: mod_base = OTHER; note = 2'-F modification
  modified_base 3..13: mod_base = OTHER; note = 2'-Ome modification
  modified_base 14: mod_base = OTHER; note = 2'-F modification
  modified_base 15: mod_base = OTHER; note = 2'-Ome modification
  modified_base 16: mod_base = OTHER; note = 2'-F modification
  modified_base 17..23: mod_base = OTHER; note = 2'-Ome modification
  modified_base 1..2: mod_base = OTHER; note = Phosphorothioate connection
  modified_base 2..3: mod_base = OTHER; note = Phosphorothioate connection
  modified_base 21..22: mod_base = OTHER; note = Phosphorothioate connection
  modified_base 22..23: mod_base = OTHER; note = Phosphorothioate connection
  source 1..23: mol_type = other RNA
cctatccatgggaagaatcctgc

SEQ ID NO: 1082 - RNA, 23 nt, synthetic construct
  misc_feature 1..23: note = Pt2818MW02antisense
  modified_base 1: mod_base = OTHER; note = 2'-Ome modification
  modified_base 2: mod_base = OTHER; note = 2'-F modification
  modified_base 3..13: mod_base = OTHER; note = 2'-Ome modification
  modified_base 14: mod_base = OTHER; note = 2'-F modification
  modified_base 15: mod_base = OTHER; note = 2'-Ome modification
  modified_base 16: mod_base = OTHER; note = 2'-F modification
  modified_base 17..23: mod_base = OTHER; note = 2'-Ome modification
  modified_base 1..2: mod_base = OTHER; note = Phosphorothioate connection
  modified_base 2..3: mod_base = OTHER; note = Phosphorothioate connection
  modified_base 21..22: mod_base = OTHER; note = Phosphorothioate connection
  modified_base 22..23: mod_base = OTHER; note = Phosphorothioate connection
  source 1..23: mol_type = other RNA
gccatcagcacctttcacactca

SEQ ID NO: 1083 - RNA, 23 nt, synthetic construct
  misc_feature 1..23: note = Pt2837MW02antisense
  modified_base 1: mod_base = OTHER; note = 2'-Ome modification
  modified_base 2: mod_base = OTHER; note = 2'-F modification
  modified_base 3..13: mod_base = OTHER; note = 2'-Ome modification
  modified_base 14: mod_base = OTHER; note = 2'-F modification
  modified_base 15: mod_base = OTHER; note = 2'-Ome modification
  modified_base 16: mod_base = OTHER; note = 2'-F modification
  modified_base 17..23: mod_base = OTHER; note = 2'-Ome modification
  modified_base 1..2: mod_base = OTHER; note = Phosphorothioate connection
  modified_base 2..3: mod_base = OTHER; note = Phosphorothioate connection
  modified_base 21..22: mod_base = OTHER; note = Phosphorothioate connection
  modified_base 22..23: mod_base = OTHER; note = Phosphorothioate connection
  source 1..23: mol_type = other RNA
cagttagctggagatgagggcca

SEQ ID NO: 1084 - RNA, 23 nt, synthetic construct
  misc_feature 1..23: note = Pt2838MW02antisense
  modified_base 1: mod_base = OTHER; note = 2'-Ome modification
  modified_base 2: mod_base = OTHER; note = 2'-F modification
  modified_base 3..13: mod_base = OTHER; note = 2'-Ome modification
  modified_base 14: mod_base = OTHER; note = 2'-F modification
  modified_base 15: mod_base = OTHER; note = 2'-Ome modification
  modified_base 16: mod_base = OTHER; note = 2'-F modification
  modified_base 17..23: mod_base = OTHER; note = 2'-Ome modification
  modified_base 1..2: mod_base = OTHER; note = Phosphorothioate connection
  modified_base 2..3: mod_base = OTHER; note = Phosphorothioate connection
  modified_base 21..22: mod_base = OTHER; note = Phosphorothioate connection
  modified_base 22..23: mod_base = OTHER; note = Phosphorothioate connection
  source 1..23: mol_type = other RNA
acagttagctggagatgagggcc

SEQ ID NO: 1085 - RNA, 23 nt, synthetic construct
  misc_feature 1..23: note = Pt2882MW02antisense
  modified_base 1: mod_base = OTHER; note = 2'-Ome modification
  modified_base 2: mod_base = OTHER; note = 2'-F modification
  modified_base 3..13: mod_base = OTHER; note = 2'-Ome modification
  modified_base 14: mod_base = OTHER; note = 2'-F modification
  modified_base 15: mod_base = OTHER; note = 2'-Ome modification
  modified_base 16: mod_base = OTHER; note = 2'-F modification
  modified_base 17..23: mod_base = OTHER; note = 2'-Ome modification
  modified_base 1..2: mod_base = OTHER; note = Phosphorothioate connection
  modified_base 2..3: mod_base = OTHER; note = Phosphorothioate connection
  modified_base 21..22: mod_base = OTHER; note = Phosphorothioate connection
  modified_base 22..23: mod_base = OTHER; note = Phosphorothioate connection
  source 1..23: mol_type = other RNA
aaagctaagcctccattaatcag

SEQ ID NO: 1086 - RNA, 23 nt, synthetic construct
  misc_feature 1..23: note = Pt2883MW02antisense
  modified_base 1: mod_base = OTHER; note = 2'-Ome modification
  modified_base 2: mod_base = OTHER; note = 2'-F modification
  modified_base 3..13: mod_base = OTHER; note = 2'-Ome modification
  modified_base 14: mod_base = OTHER; note = 2'-F modification
  modified_base 15: mod_base = OTHER; note = 2'-Ome modification
  modified_base 16: mod_base = OTHER; note = 2'-F modification
  modified_base 17..23: mod_base = OTHER; note = 2'-Ome modification
  modified_base 1..2: mod_base = OTHER; note = Phosphorothioate connection
  modified_base 2..3: mod_base = OTHER; note = Phosphorothioate connection
  modified_base 21..22: mod_base = OTHER; note = Phosphorothioate connection
  modified_base 22..23: mod_base = OTHER; note = Phosphorothioate connection
  source 1..23: mol_type = other RNA
gaaagctaagcctccattaatca

SEQ ID NO: 1087 - RNA, 23 nt, synthetic construct
  misc_feature 1..23: note = Pt2888MW02antisense
  modified_base 1: mod_base = OTHER; note = 2'-Ome modification
  modified_base 2: mod_base = OTHER; note = 2'-F modification
  modified_base 3..13: mod_base = OTHER; note = 2'-Ome modification
  modified_base 14: mod_base = OTHER; note = 2'-F modification
  modified_base 15: mod_base = OTHER; note = 2'-Ome modification
  modified_base 16: mod_base = OTHER; note = 2'-F modification
  modified_base 17..23: mod_base = OTHER; note = 2'-Ome modification
  modified_base 1..2: mod_base = OTHER; note = Phosphorothioate connection
  modified_base 2..3: mod_base = OTHER; note = Phosphorothioate connection
  modified_base 21..22: mod_base = OTHER; note = Phosphorothioate connection
  modified_base 22..23: mod_base = OTHER; note = Phosphorothioate connection
  source 1..23: mol_type = other RNA
atccagaaagctaagcctccatt

SEQ ID NO: 1088 - RNA, 23 nt, synthetic construct
  misc_feature 1..23: note = Pt2889MW02antisense
  modified_base 1: mod_base = OTHER; note = 2'-Ome modification
  modified_base 2: mod_base = OTHER; note = 2'-F modification
  modified_base 3..13: mod_base = OTHER; note = 2'-Ome modification
  modified_base 14: mod_base = OTHER; note = 2'-F modification
  modified_base 15: mod_base = OTHER; note = 2'-Ome modification
  modified_base 16: mod_base = OTHER; note = 2'-F modification
  modified_base 17..23: mod_base = OTHER; note = 2'-Ome modification
  modified_base 1..2: mod_base = OTHER; note = Phosphorothioate connection
  modified_base 2..3: mod_base = OTHER; note = Phosphorothioate connection
  modified_base 21..22: mod_base = OTHER; note = Phosphorothioate connection
  modified_base 22..23: mod_base = OTHER; note = Phosphorothioate connection
  source 1..23: mol_type = other RNA
catccagaaagctaagcctccat

SEQ ID NO: 1089 - RNA, 23 nt, synthetic construct
  misc_feature 1..23: note = Pt2980MW02antisense
  modified_base 1: mod_base = OTHER; note = 2'-Ome modification
  modified_base 2: mod_base = OTHER; note = 2'-F modification
  modified_base 3..13: mod_base = OTHER; note = 2'-Ome modification
  modified_base 14: mod_base = OTHER; note = 2'-F modification
  modified_base 15: mod_base = OTHER; note = 2'-Ome modification
  modified_base 16: mod_base = OTHER; note = 2'-F modification
  modified_base 17..23: mod_base = OTHER; note = 2'-Ome modification
  modified_base 1..2: mod_base = OTHER; note = Phosphorothioate connection
  modified_base 2..3: mod_base = OTHER; note = Phosphorothioate connection
  modified_base 21..22: mod_base = OTHER; note = Phosphorothioate connection
  modified_base 22..23: mod_base = OTHER; note = Phosphorothioate connection
  source 1..23: mol_type = other RNA
tggcatagagcagagtaaaggtg

SEQ ID NO: 1090 - RNA, 23 nt, synthetic construct
  misc_feature 1..23: note = Pt2991MW02antisense
  modified_base 1: mod_base = OTHER; note = 2'-Ome modification
  modified_base 2: mod_base = OTHER; note = 2'-F modification
  modified_base 3..13: mod_base = OTHER; note = 2'-Ome modification
  modified_base 14: mod_base = OTHER; note = 2'-F modification
  modified_base 15: mod_base = OTHER; note = 2'-Ome modification
  modified_base 16: mod_base = OTHER; note = 2'-F modification
  modified_base 17..23: mod_base = OTHER; note = 2'-Ome modification
  modified_base 1..2: mod_base = OTHER; note = Phosphorothioate connection
  modified_base 2..3: mod_base = OTHER; note = Phosphorothioate connection
  modified_base 21..22: mod_base = OTHER; note = Phosphorothioate connection
  modified_base 22..23: mod_base = OTHER; note = Phosphorothioate connection
  source 1..23: mol_type = other RNA
ctagcacagcctggcatagagca

SEQ ID NO: 1091 - RNA, 23 nt, synthetic construct
  misc_feature 1..23: note = Pt3138MW02antisense
  modified_base 1: mod_base = OTHER; note = 2'-Ome modification
  modified_base 2: mod_base = OTHER; note = 2'-F modification
  modified_base 3..13: mod_base = OTHER; note = 2'-Ome modification
  modified_base 14: mod_base = OTHER; note = 2'-F modification
  modified_base 15: mod_base = OTHER; note = 2'-Ome modification
  modified_base 16: mod_base = OTHER; note = 2'-F modification
  modified_base 17..23: mod_base = OTHER; note = 2'-Ome modification
  modified_base 1..2: mod_base = OTHER; note = Phosphorothioate connection
  modified_base 2..3: mod_base = OTHER; note = Phosphorothioate connection
  modified_base 21..22: mod_base = OTHER; note = Phosphorothioate connection
  modified_base 22..23: mod_base = OTHER; note = Phosphorothioate connection
  source 1..23: mol_type = other RNA
ttccaggtttcttcctctgtgaa

SEQ ID NO: 1092 - RNA, 23 nt, synthetic construct
  misc_feature 1..23: note = Pt3139MW02antisense
  modified_base 1: mod_base = OTHER; note = 2'-Ome modification
  modified_base 2: mod_base = OTHER; note = 2'-F modification
  modified_base 3..13: mod_base = OTHER; note = 2'-Ome modification
  modified_base 14: mod_base = OTHER; note = 2'-F modification
  modified_base 15: mod_base = OTHER; note = 2'-Ome modification
  modified_base 16: mod_base = OTHER; note = 2'-F modification
  modified_base 17..23: mod_base = OTHER; note = 2'-Ome modification
  modified_base 1..2: mod_base = OTHER; note = Phosphorothioate connection
  modified_base 2..3: mod_base = OTHER; note = Phosphorothioate connection
  modified_base 21..22: mod_base = OTHER; note = Phosphorothioate connection
  modified_base 22..23: mod_base = OTHER; note = Phosphorothioate connection
  source 1..23: mol_type = other RNA
gttccaggtttcttcctctgtga

SEQ ID NO: 1093 - RNA, 23 nt, synthetic construct
  misc_feature 1..23: note = Pt3141MW02antisense
  modified_base 1: mod_base = OTHER; note = 2'-Ome modification
  modified_base 2: mod_base = OTHER; note = 2'-F modification
  modified_base 3..13: mod_base = OTHER; note = 2'-Ome modification
  modified_base 14: mod_base = OTHER; note = 2'-F modification
  modified_base 15: mod_base = OTHER; note = 2'-Ome modification
  modified_base 16: mod_base = OTHER; note = 2'-F modification
  modified_base 17..23: mod_base = OTHER; note = 2'-Ome modification
  modified_base 1..2: mod_base = OTHER; note = Phosphorothioate connection
  modified_base 2..3: mod_base = OTHER; note = Phosphorothioate connection
  modified_base 21..22: mod_base = OTHER; note = Phosphorothioate connection
  modified_base 22..23: mod_base = OTHER; note = Phosphorothioate connection
  source 1..23: mol_type = other RNA
tggttccaggtttcttcctctgt

SEQ ID NO: 1094 - RNA, 23 nt, synthetic construct
  misc_feature 1..23: note = Pt3185MW02antisense
  modified_base 1: mod_base = OTHER; note = 2'-Ome modification
  modified_base 2: mod_base = OTHER; note = 2'-F modification
  modified_base 3..13: mod_base = OTHER; note = 2'-Ome modification
  modified_base 14: mod_base = OTHER; note = 2'-F modification
  modified_base 15: mod_base = OTHER; note = 2'-Ome modification
  modified_base 16: mod_base = OTHER; note = 2'-F modification
  modified_base 17..23: mod_base = OTHER; note = 2'-Ome modification
  modified_base 1..2: mod_base = OTHER; note = Phosphorothioate connection
  modified_base 2..3: mod_base = OTHER; note = Phosphorothioate connection
  modified_base 21..22: mod_base = OTHER; note = Phosphorothioate connection
  modified_base 22..23: mod_base = OTHER; note = Phosphorothioate connection
  source 1..23: mol_type = other RNA
ctggctcagttcctgctgtgtga

SEQ ID NO: 1095 - RNA, 23 nt, synthetic construct
  misc_feature 1..23: note = Pt3186MW02antisense
  modified_base 1: mod_base = OTHER; note = 2'-Ome modification
  modified_base 2: mod_base = OTHER; note = 2'-F modification
  modified_base 3..13: mod_base = OTHER; note = 2'-Ome modification
  modified_base 14: mod_base = OTHER; note = 2'-F modification
  modified_base 15: mod_base = OTHER; note = 2'-Ome modification
  modified_base 16: mod_base = OTHER; note = 2'-F modification
  modified_base 17..23: mod_base = OTHER; note = 2'-Ome modification
  modified_base 1..2: mod_base = OTHER; note = Phosphorothioate connection
  modified_base 2..3: mod_base = OTHER; note = Phosphorothioate connection
  modified_base 21..22: mod_base = OTHER; note = Phosphorothioate connection
  modified_base 22..23: mod_base = OTHER; note = Phosphorothioate connection
  source 1..23: mol_type = other RNA
tctggctcagttcctgctgtgtg

SEQ ID NO: 1096 - RNA, 23 nt, synthetic construct
  misc_feature 1..23: note = Pt3191MW02antisense
  modified_base 1: mod_base = OTHER; note = 2'-Ome modification
  modified_base 2: mod_base = OTHER; note = 2'-F modification
  modified_base 3..13: mod_base = OTHER; note = 2'-Ome modification
  modified_base 14: mod_base = OTHER; note = 2'-F modification
  modified_base 15: mod_base = OTHER; note = 2'-Ome modification
  modified_base 16: mod_base = OTHER; note = 2'-F modification
  modified_base 17..23: mod_base = OTHER; note = 2'-Ome modification
  modified_base 1..2: mod_base = OTHER; note = Phosphorothioate connection
  modified_base 2..3: mod_base = OTHER; note = Phosphorothioate connection
  modified_base 21..22: mod_base = OTHER; note = Phosphorothioate connection
  modified_base 22..23: mod_base = OTHER; note = Phosphorothioate connection
  source 1..23: mol_type = other RNA
gcgtttctggctcagttcctgct

SEQ ID NO: 1097 - RNA, 23 nt, synthetic construct
  misc_feature 1..23: note = Pt3193MW02antisense
  modified_base 1: mod_base = OTHER; note = 2'-Ome modification
  modified_base 2: mod_base = OTHER; note = 2'-F modification
  modified_base 3..13: mod_base = OTHER; note = 2'-Ome modification
  modified_base 14: mod_base = OTHER; note = 2'-F modification
  modified_base 15: mod_base = OTHER; note = 2'-Ome modification
  modified_base 16: mod_base = OTHER; note = 2'-F modification
  modified_base 17..23: mod_base = OTHER; note = 2'-Ome modification
  modified_base 1..2: mod_base = OTHER; note = Phosphorothioate connection
  modified_base 2..3: mod_base = OTHER; note = Phosphorothioate connection
  modified_base 21..22: mod_base = OTHER; note = Phosphorothioate connection
  modified_base 22..23: mod_base = OTHER; note = Phosphorothioate connection
  source 1..23: mol_type = other RNA
ctgcgtttctggctcagttcctg

SEQ ID NO: 1098 - RNA, 23 nt, synthetic construct
  misc_feature 1..23: note = Pt3194MW02antisense
  modified_base 1: mod_base = OTHER; note = 2'-Ome modification
  modified_base 2: mod_base = OTHER; note = 2'-F modification
  modified_base 3..13: mod_base = OTHER; note = 2'-Ome modification
  modified_base 14: mod_base = OTHER; note = 2'-F modification
  modified_base 15: mod_base = OTHER; note = 2'-Ome modification
  modified_base 16: mod_base = OTHER; note = 2'-F modification
  modified_base 17..23: mod_base = OTHER; note = 2'-Ome modification
  modified_base 1..2: mod_base = OTHER; note = Phosphorothioate connection
  modified_base 2..3: mod_base = OTHER; note = Phosphorothioate connection
  modified_base 21..22: mod_base = OTHER; note = Phosphorothioate connection
  modified_base 22..23: mod_base = OTHER; note = Phosphorothioate connection
  source 1..23: mol_type = other RNA
tctgcgtttctggctcagttcct

SEQ ID NO: 1099 - RNA, 23 nt, synthetic construct
  misc_feature 1..23: note = Pt3199MW02antisense
  modified_base 1: mod_base = OTHER; note = 2'-Ome modification
  modified_base 2: mod_base = OTHER; note = 2'-F modification
  modified_base 3..13: mod_base = OTHER; note = 2'-Ome modification
  modified_base 14: mod_base = OTHER; note = 2'-F modification
  modified_base 15: mod_base = OTHER; note = 2'-Ome modification
  modified_base 16: mod_base = OTHER; note = 2'-F modification
  modified_base 17..23: mod_base = OTHER; note = 2'-Ome modification
  modified_base 1..2: mod_base = OTHER; note = Phosphorothioate connection
  modified_base 2..3: mod_base = OTHER; note = Phosphorothioate connection
  modified_base 21..22: mod_base = OTHER; note = Phosphorothioate connection
  modified_base 22..23: mod_base = OTHER; note = Phosphorothioate connection
  source 1..23: mol_type = other RNA
cccaatctgcgtttctggctcag

SEQ ID NO: 1100 - RNA, 23 nt, synthetic construct
  misc_feature 1..23: note = Pt3236MW02antisense
  modified_base 1: mod_base = OTHER; note = 2'-Ome modification
  modified_base 2: mod_base = OTHER; note = 2'-F modification
  modified_base 3..13: mod_base = OTHER; note = 2'-Ome modification
  modified_base 14: mod_base = OTHER; note = 2'-F modification
  modified_base 15: mod_base = OTHER; note = 2'-Ome modification
  modified_base 16: mod_base = OTHER; note = 2'-F modification
  modified_base 17..23: mod_base = OTHER; note = 2'-Ome modification
  modified_base 1..2: mod_base = OTHER; note = Phosphorothioate connection
  modified_base 2..3: mod_base = OTHER; note = Phosphorothioate connection
  modified_base 21..22: mod_base = OTHER; note = Phosphorothioate connection
  modified_base 22..23: mod_base = OTHER; note = Phosphorothioate connection
  source 1..23: mol_type = other RNA
ccgggtgaagtaagaagaggctt

SEQ ID NO: 1101 - RNA, 23 nt, synthetic construct
  misc_feature 1..23: note = Pt3276MW02antisense
  modified_base 1: mod_base = OTHER; note = 2'-Ome modification
  modified_base 2: mod_base = OTHER; note = 2'-F modification
  modified_base 3..13: mod_base = OTHER; note = 2'-Ome modification
  modified_base 14: mod_base = OTHER; note = 2'-F modification
  modified_base 15: mod_base = OTHER; note = 2'-Ome modification
  modified_base 16: mod_base = OTHER; note = 2'-F modification
  modified_base 17..23: mod_base = OTHER; note = 2'-Ome modification
  modified_base 1..2: mod_base = OTHER; note = Phosphorothioate connection
  modified_base 2..3: mod_base = OTHER; note = Phosphorothioate connection
  modified_base 21..22: mod_base = OTHER; note = Phosphorothioate connection
  modified_base 22..23: mod_base = OTHER; note = Phosphorothioate connection
  source 1..23: mol_type = other RNA
ttcccagcctcactgttacccgt

SEQ ID NO: 1102 - RNA, 23 nt, synthetic construct
  misc_feature 1..23: note = Pt3304MW02antisense
  modified_base 1: mod_base = OTHER; note = 2'-Ome modification
  modified_base 2: mod_base = OTHER; note = 2'-F modification
  modified_base 3..13: mod_base = OTHER; note = 2'-Ome modification
  modified_base 14: mod_base = OTHER; note = 2'-F modification
  modified_base 15: mod_base = OTHER; note = 2'-Ome modification
  modified_base 16: mod_base = OTHER; note = 2'-F modification
  modified_base 17..23: mod_base = OTHER; note = 2'-Ome modification
  modified_base 1..2: mod_base = OTHER; note = Phosphorothioate connection
  modified_base 2..3: mod_base = OTHER; note = Phosphorothioate connection
  modified_base 21..22: mod_base = OTHER; note = Phosphorothioate connection
  modified_base 22..23: mod_base = OTHER; note = Phosphorothioate connection
  source 1..23: mol_type = other RNA
tcaccgagcttcctggtctgtgt

SEQ ID NO: 1103 - RNA, 23 nt, synthetic construct
  misc_feature 1..23: note = Pt3315MW02antisense
  modified_base 1: mod_base = OTHER; note = 2'-Ome modification
  modified_base 2: mod_base = OTHER; note = 2'-F modification
  modified_base 3..13: mod_base = OTHER; note = 2'-Ome modification
  modified_base 14: mod_base = OTHER; note = 2'-F modification
  modified_base 15: mod_base = OTHER; note = 2'-Ome modification
  modified_base 16: mod_base = OTHER; note = 2'-F modification
  modified_base 17..23: mod_base = OTHER; note = 2'-Ome modification
  modified_base 1..2: mod_base = OTHER; note = Phosphorothioate connection
  modified_base 2..3: mod_base = OTHER; note = Phosphorothioate connection
  modified_base 21..22: mod_base = OTHER; note = Phosphorothioate connection
  modified_base 22..23: mod_base = OTHER; note = Phosphorothioate connection
  source 1..23: mol_type = other RNA
tctgccatcactcaccgagcttc

SEQ ID NO: 1104 - RNA, 23 nt, synthetic construct
  misc_feature 1..23: note = Pt3436MW02antisense
  modified_base 1: mod_base = OTHER; note = 2'-Ome modification
  modified_base 2: mod_base = OTHER; note = 2'-F modification
  modified_base 3..13: mod_base = OTHER; note = 2'-Ome modification
  modified_base 14: mod_base = OTHER; note = 2'-F modification
  modified_base 15: mod_base = OTHER; note = 2'-Ome modification
  modified_base 16: mod_base = OTHER; note = 2'-F modification
  modified_base 17..23: mod_base = OTHER; note = 2'-Ome modification
  modified_base 1..2: mod_base = OTHER; note = Phosphorothioate connection
  modified_base 2..3: mod_base = OTHER; note = Phosphorothioate connection
  modified_base 21..22: mod_base = OTHER; note = Phosphorothioate connection
  modified_base 22..23: mod_base = OTHER; note = Phosphorothioate connection
  source 1..23: mol_type = other RNA
ggtgctcaaggagggacagttgt

SEQ ID NO: 1105 - RNA, 23 nt, synthetic construct
  misc_feature 1..23: note = Pt3438MW02antisense
  modified_base 1: mod_base = OTHER; note = 2'-Ome modification
  modified_base 2: mod_base = OTHER; note = 2'-F modification
  modified_base 3..13: mod_base = OTHER; note = 2'-Ome modification
  modified_base 14: mod_base = OTHER; note = 2'-F modification
  modified_base 15: mod_base = OTHER; note = 2'-Ome modification
  modified_base 16: mod_base = OTHER; note = 2'-F modification
  modified_base 17..23: mod_base = OTHER; note = 2'-Ome modification
  modified_base 1..2: mod_base = OTHER; note = Phosphorothioate connection
  modified_base 2..3: mod_base = OTHER; note = Phosphorothioate connection
  modified_base 21..22: mod_base = OTHER; note = Phosphorothioate connection
  modified_base 22..23: mod_base = OTHER; note = Phosphorothioate connection
  source 1..23: mol_type = other RNA
ctggtgctcaaggagggacagtt

SEQ ID NO: 1106 - RNA, 23 nt, synthetic construct
  misc_feature 1..23: note = Pt3493MW02antisense
  modified_base 1: mod_base = OTHER; note = 2'-Ome modification
  modified_base 2: mod_base = OTHER; note = 2'-F modification
  modified_base 3..13: mod_base = OTHER; note = 2'-Ome modification
  modified_base 14: mod_base = OTHER; note = 2'-F modification
  modified_base 15: mod_base = OTHER; note = 2'-Ome modification
  modified_base 16: mod_base = OTHER; note = 2'-F modification
  modified_base 17..23: mod_base = OTHER; note = 2'-Ome modification
  modified_base 1..2: mod_base = OTHER; note = Phosphorothioate connection
  modified_base 2..3: mod_base = OTHER; note = Phosphorothioate connection
  modified_base 21..22: mod_base = OTHER; note = Phosphorothioate connection
  modified_base 22..23: mod_base = OTHER; note = Phosphorothioate connection
  source 1..23: mol_type = other RNA
aaaggcaacagagaggacagacc

SEQ ID NO: 1107 - RNA, 23 nt, synthetic construct
  misc_feature 1..23: note = Pt3553MW02antisense
  modified_base 1: mod_base = OTHER; note = 2'-Ome modification
  modified_base 2: mod_base = OTHER; note = 2'-F modification
  modified_base 3..13: mod_base = OTHER; note = 2'-Ome modification
  modified_base 14: mod_base = OTHER; note = 2'-F modification
  modified_base 15: mod_base = OTHER; note = 2'-Ome modification
  modified_base 16: mod_base = OTHER; note = 2'-F modification
  modified_base 17..23: mod_base = OTHER; note = 2'-Ome modification
  modified_base 1..2: mod_base = OTHER; note = Phosphorothioate connection
  modified_base 2..3: mod_base = OTHER; note = Phosphorothioate connection
  modified_base 21..22: mod_base = OTHER; note = Phosphorothioate connection
  modified_base 22..23: mod_base = OTHER; note = Phosphorothioate connection
  source 1..23: mol_type = other RNA
acccagaataaatatcttcaagt

SEQ ID NO: 1108 - RNA, 23 nt, Homo sapiens
  source 1..23: mol_type = other RNA
cagggtacacattcgcaccccta

SEQ ID NO: 1109 - RNA, 23 nt, Homo sapiens
  source 1..23: mol_type = other RNA
cttcacagaggaagaaacctgga

SEQ ID NO: 1110 - RNA, 23 nt, Homo sapiens
  source 1..23: mol_type = other RNA
cagcaggaactgagccagaaaca

SEQ ID NO: 1111 - RNA, 23 nt, Homo sapiens
  source 1..23: mol_type = other RNA
ccaatctgcgtttctggctcagt

SEQ ID NO: 1112 - RNA, 3760 nt, Homo sapiens
  source 1..3760: mol_type = mRNA
agcgacgtcgaggcgctcatggttgcaggcgggcgccgccgttcagttcagggtctgagcctggaggagtgagccaggcagtgagactggctcgggcgggccgggacgcgtcgttgcagcagcggctcccagctcccagccaggattccgcgcgccccttcacgcgccctgctcctgaacttcagctcctgcacagtcctccccaccgcaaggctcaaggcgccgccggcgtggaccgcgcacggcctctaggtctcctcgccaggacagcaacctctcccctggccctcatgggcaccgtcagctccaggcggtcctggtggccgctgccactgctgctgctgctgctgctgctcctgggtcccgcgggcgcccgtgcgcaggaggacgaggacggcgactacgaggagctggtgctagccttgcgttccgaggaggacggcctggccgaagcacccgagcacggaaccacagccaccttccaccgctgcgccaagatggagtttcgctcttgttgcccaggctggagtgcaatggtgcagtctcagctcactgcaacatctgtctcccgggttcaagtggttctcctgcctcagcctcccaagaagctgggattacaggatccgtggaggttgcctggcacctacgtggtggtgctgaaggaggagacccacctctcgcagtcagagcgcactgcccgccgcctgcaggcccaggctgcccgccggggatacctcaccaagatcctgcatgtcttccatggccttcttcctggcttcctggtgaagatgagtggcgacctgctggagctggccttgaagttgccccatgtcgactacatcgaggaggactcctctgtctttgcccagagcatcccgtggaacctggagcggattacccctccacggtaccgggcggatgaataccagccccccgacggaggcagcctggtggaggtgtatctcctagacaccagcatacagagtgaccaccgggaaatcgagggcagggtcatggtcaccgacttcgagaatgtgcccgaggaggacgggacccgcttccacagacaggccagcaagtgtgacagtcatggcacccacctggcaggggtggtcagcggccgggatgccggcgtggccaagggtgccagcatgcgcagcctgcgcgtgctcaactgccaagggaagggcacggttagcggcaccctcataggcctggagtttattcggaaaagccagctggtccagcctgtggggccactggtggtgctgctgcccctggcgggtgggtacagccgcgtcctcaacgccgcctgccagcgcctggcgagggctggggtcgtgctggtcaccgctgccggcaacttccgggacgatgcctgcctctactccccagcctcagctcccgaggtcatcacagttggggccaccaatgcccaagaccagccggtgaccctggggactttggggaccaactttggccgctgtgtggacctctttgccccaggggaggacatcattggtgcctccagcgactgcagcacctgctttgtgtcacagagtgggacatcacaggctgctgcccacgtggctggcattgcagccatgatgctgtctgccgagccggagctcaccctggccgagttgaggcagagactgatccacttctctgccaaagatgtcatcaatgaggcctggttccctgaggaccagcgggtactgacccccaacctggtggccgccctgccccccagcacccatggggcaggttggcagctgttttgcaggactgtatggtcagcacactcggggcctacacggatggccacagccgtcgcccgctgcgccccagatgaggagctgctgagctgctccagtttctccaggagtgggaagcggcggggcgagcgcatggaggcccaagggggcaagctggtctgccgggcccacaacgcttttgggggtgagggtgtctacgccattgccaggtgctgcctgctaccccaggccaactgcagcgtccacacagctccaccagctgaggccagcatggggacccgtgtccactgccaccaacagggccacgtcctcacaggctgcagctcccactgggaggtggaggaccttggcacccacaagccgcctgtgctgaggccacgaggtcagcccaaccagtgcgtgggccacagggaggccagcatccacgcttcctgctgccatgccccaggtctggaatgcaaagtcaaggagcatggaatcccggcccctcaggagcaggtgaccgtggcctgcgaggagggctggaccctgactggctgcagtgccctccctgggacctcccacgtcctgggggcctacgccgtagacaacacgtgtgtagtcaggagccgggacgtcagcactacaggcagcaccagcgaaggggccgtgacagccgttgccatctgctgccggagccggcacctggcgcaggcctcccaggagctccagtgacagccccatcccaggatgggtgtctggggagggtcaagggctggggctgagctttaaaatggttccgacttgtccctctctcagccctccatggcctggcacgaggggatggggatgcttccgcctttccggggctgctggcctggcccttgagtggggcagcctccttgcctggaactcactcactctgggtgcctcctccccaggtggaggtgccaggaagctccctccctcactgtggggcatttcaccattcaaacaggtcgagctgtgctcgggtgctgccagctgctcccaatgtgccgatgtccgtgggcagaatgacttttattgagctcttgttccgtgccaggcattcaatcctcaggtctccaccaaggaggcaggattcttcccatggataggggagggggcggtaggggctgcagggacaaacatcgttggggggtgagtgtgaaaggtgctgatggccctcatctccagctaactgtggagaagcccctgggggctccctgattaatggaggcttagctttctggatggcatctagccagaggctggagacaggtgcgcccctggtggtcacaggctgtgccttggtttcctgagccacctttactctgctctatgccaggctgtgctagcaacacccaaaggtggcctgcggggagccatcacctaggactgactcggcagtgtgcagtggtgcatgcactgtctcagccaacccgctccactacccggcagggtacacattcgcacccctacttcacagaggaagaaacctggaaccagagggggcgtgcctgccaagctcacacagcaggaactgagccagaaacgcagattgggctggctctgaagccaagcctcttcttacttcacccggctgggctcctcatttttacgggtaacagtgaggctgggaaggggaacacagaccaggaagctcggtgagtgatggcagaacgatgcctgcaggcatggaactttttccgttatcacccaggcctgattcactggcctggcggagatgcttctaaggcatggtcgggggagagggccaacaactgtccctccttgagcaccagccccacccaagcaagcagacatttatcttttgggtctgtcctctctgttgcctttttacagccaacttttctagacctgttttgcttttgtaacttgaagatatttattctgggttttgtagcatttttattaatatggtgactttttaaaataaaaacaaacaaacgttgtcctaa

SEQ ID NO: 1113 - DNA, 19 bp, synthetic construct
  misc_feature 1..19: note = PCSK9 primer 1-12plate
  source 1..19: mol_type = other DNA
agacccacctctcgcagtc

SEQ ID NO: 1114 - DNA, 21 bp, synthetic construct
  misc_feature 1..21: note = PCSK9 primer 2-12plate
  source 1..21: mol_type = other DNA
ggagtcctcctcgatgtagtc

SEQ ID NO: 1115 - DNA, 21 bp, synthetic construct
  misc_feature 1..21: note = GAPDH primer 1-12plate
  source 1..21: mol_type = other DNA
ggagcgagatccctccaaaat

SEQ ID NO: 1116 - DNA, 23 bp, synthetic construct
  misc_feature 1..23: note = GAPDH primer 2-12plate
  source 1..23: mol_type = other DNA
ggctgttgtcatacttctcatgg

SEQ ID NO: 1117 - DNA, 14 bp, synthetic construct
  misc_feature 1..14: note = PCKS 9 probe primer-96 plate
  source 1..14: mol_type = other DNA
ccacccaagcaagc

SEQ ID NO: 1118 - DNA, 19 bp, synthetic construct
  misc_feature 1..19: note = PCKS 9 primer 1-96 plate
  source 1..19: mol_type = other DNA
gggagagggccaacaactg

SEQ ID NO: 1119 - DNA, 26 bp, synthetic construct
  misc_feature 1..26: note = PCKS 9 primer2-96 plate
  source 1..26: mol_type = other DNA
agaggacagacccaaaagataaatgt

SEQ ID NO: 1120 - DNA, 18 bp, synthetic construct
  misc_feature 1..18: note = GAPDH probe primer-96 plate
  source 1..18: mol_type = other DNA
caacagcgacacccactc

SEQ ID NO: 1121 - DNA, 19 bp, synthetic construct
  misc_feature 1..19: note = GAPDH primer 1-96 plate
  source 1..19: mol_type = other DNA
aagaaggtggtgaagcagg

SEQ ID NO: 1122 - DNA, 18 bp, synthetic construct
  misc_feature 1..18: note = GAPDH primer2-96 plate
  source 1..18: mol_type = other DNA
caaagtggtcgttgaggg

SEQ ID NO: 1123 - RNA, 21 nt, synthetic construct
  misc_feature 1..21: note = SP341.6-11sense
  source 1..21: mol_type = other RNA
ccaacttttctagacctgtta

SEQ ID NO: 1124 - RNA, 21 nt, synthetic construct
  misc_feature 1..21: note = Ps3543.6-11sense
  source 1..21: mol_type = other RNA
cttttgtaacttgaagatata

SEQ ID NO: 1125 - RNA, 23 nt, synthetic construct
  misc_feature 1..23: note = SP341.1antisense
  source 1..23: mol_type = other RNA
aaacaggtctagaaaagttggtt

SEQ ID NO: 1126 - RNA, 23 nt, synthetic construct
  misc_feature 1..23: note = SP341.2antisense
  source 1..23: mol_type = other RNA
aaacaggtctagaaaagttggta

SEQ ID NO: 1127 - RNA, 23 nt, synthetic construct
  misc_feature 1..23: note = SP341.3antisense
  source 1..23: mol_type = other RNA
aaacaggtctagaaaagttggat

SEQ ID NO: 1128 - RNA, 23 nt, synthetic construct
  misc_feature 1..23: note = SP341.4antisense
  source 1..23: mol_type = other RNA
aaacaggtctagaaaagttggaa

SEQ ID NO: 1129 - RNA, 23 nt, synthetic construct
  misc_feature 1..23: note = SP341.5antisense
  source 1..23: mol_type = other RNA
aaacaggtctagaaaagttggca

SEQ ID NO: 1130 - RNA, 23 nt, synthetic construct
  misc_feature 1..23: note = SP341.6antisense
  source 1..23: mol_type = other RNA
taacaggtctagaaaagttggct

SEQ ID NO: 1131 - RNA, 23 nt, synthetic construct
  misc_feature 1..23: note = SP341.7antisense
  source 1..23: mol_type = other RNA
taacaggtctagaaaagttggtt

SEQ ID NO: 1132 - RNA, 23 nt, synthetic construct
  misc_feature 1..23: note = SP341.8antisense
  source 1..23: mol_type = other RNA
taacaggtctagaaaagttggta

SEQ ID NO: 1133 - RNA, 23 nt, synthetic construct
  misc_feature 1..23: note = SP341.9antisense
  source 1..23: mol_type = other RNA
taacaggtctagaaaagttggat

SEQ ID NO: 1134 - RNA, 23 nt, synthetic construct
  misc_feature 1..23: note = SP341.10antisense
  source 1..23: mol_type = other RNA
taacaggtctagaaaagttggaa

SEQ ID NO: 1135 - RNA, 23 nt, synthetic construct
  misc_feature 1..23: note = SP341.11antisense
  source 1..23: mol_type = other RNA
taacaggtctagaaaagttggca

SEQ ID NO: 1136 - RNA, 23 nt, synthetic construct
  misc_feature 1..23: note = Ps3543.1antisense
  source 1..23: mol_type = other RNA
aatatcttcaagttacaaaagta

SEQ ID NO: 1137 - RNA, 23 nt, synthetic construct
  misc_feature 1..23: note = Ps3543.2antisense
  source 1..23: mol_type = other RNA
aatatcttcaagttacaaaagtt

SEQ ID NO: 1138 - RNA, 23 nt, synthetic construct
  misc_feature 1..23: note = Ps3543.3antisense
  source 1..23: mol_type = other RNA
aatatcttcaagttacaaaagaa

SEQ ID NO: 1139 - RNA, 23 nt, synthetic construct
  misc_feature 1..23: note = Ps3543.4antisense
  source 1..23: mol_type = other RNA
aatatcttcaagttacaaaagat

SEQ ID NO: 1140 - RNA, 23 nt, synthetic construct
  misc_feature 1..23: note = Ps3543.5antisense
  source 1..23: mol_type = other RNA
aatatcttcaagttacaaaagct

SEQ ID NO: 1141 - RNA, 23 nt, synthetic construct
  misc_feature 1..23: note = Ps3543.6antisense
  source 1..23: mol_type = other RNA
tatatcttcaagttacaaaagca

SEQ ID NO: 1142 - RNA, 23 nt, synthetic construct
  misc_feature 1..23: note = Ps3543.7antisense
  source 1..23: mol_type = other RNA
tatatcttcaagttacaaaagta

SEQ ID NO: 1143 - RNA, 23 nt, synthetic construct
  misc_feature 1..23: note = Ps3543.8antisense
  source 1..23: mol_type = other RNA
tatatcttcaagttacaaaagtt

SEQ ID NO: 1144 - RNA, 23 nt, synthetic construct
  misc_feature 1..23: note = Ps3543.9antisense
  source 1..23: mol_type = other RNA
tatatcttcaagttacaaaagaa

SEQ ID NO: 1145 - RNA, 23 nt, synthetic construct
  misc_feature 1..23: note = Ps3543.10antisense
  source 1..23: mol_type = other RNA
tatatcttcaagttacaaaagat

SEQ ID NO: 1146 - RNA, 23 nt, synthetic construct
  misc_feature 1..23: note = Ps3543.11antisense
  source 1..23: mol_type = other RNA
tatatcttcaagttacaaaagct

SEQ ID NO: 1147 - RNA, 21 nt, synthetic construct
  misc_feature 1..21: note = SP341.6-SP346.11MW02sense
  modified_base 1..6: mod_base = OTHER; note = 2'-Ome modification
  modified_base 7: mod_base = OTHER; note = 2'-F modification
  modified_base 8: mod_base = OTHER; note = 2'-Ome modification
  modified_base 9..11: mod_base = OTHER; note = 2'-F modification
  modified_base 12..21: mod_base = OTHER; note = 2'-Ome modification
  modified_base 1..2: mod_base = OTHER; note = Phosphorothioate connection
  modified_base 2..3: mod_base = OTHER; note = Phosphorothioate connection
  source 1..21: mol_type = other RNA
ccaacttttctagacctgtta

SEQ ID NO: 1148 - RNA, 21 nt, synthetic construct
  misc_feature 1..21: note = Ps3543.6-Ps3543.6MW02sense
  modified_base 1..6: mod_base = OTHER; note = 2'-Ome modification
  modified_base 7: mod_base = OTHER; note = 2'-F modification
  modified_base 8: mod_base = OTHER; note = 2'-Ome modification
  modified_base 9..11: mod_base = OTHER; note = 2'-F modification
  modified_base 12..21: mod_base = OTHER; note = 2'-Ome modification
  modified_base 1..2: mod_base = OTHER; note = Phosphorothioate connection
  modified_base 2..3: mod_base = OTHER; note = Phosphorothioate connection
  source 1..21: mol_type = other RNA
cttttgtaacttgaagatata

SEQ ID NO: 1149 - RNA, 23 nt, synthetic construct
  misc_feature 1..23: note = SP341.1MW02antisense
  modified_base 1: mod_base = OTHER; note = 2'-Ome modification
  modified_base 2: mod_base = OTHER; note = 2'-F modification
  modified_base 3..13: mod_base = OTHER; note = 2'-Ome modification
  modified_base 14: mod_base = OTHER; note = 2'-F modification
  modified_base 15: mod_base = OTHER; note = 2'-Ome modification
  modified_base 16: mod_base = OTHER; note = 2'-F modification
  modified_base 17..23: mod_base = OTHER; note = 2'-Ome modification
  modified_base 1..2: mod_base = OTHER; note = Phosphorothioate connection
  modified_base 2..3: mod_base = OTHER; note = Phosphorothioate connection
  modified_base 21..22: mod_base = OTHER; note = Phosphorothioate connection
  modified_base 22..23: mod_base = OTHER; note = Phosphorothioate connection
  source 1..23: mol_type = other RNA
aaacaggtctagaaaagttggtt

SEQ ID NO: 1150 - RNA, 23 nt, synthetic construct
  misc_feature 1..23: note = SP341.2MW02antisense
  modified_base 1: mod_base = OTHER; note = 2'-Ome modification
  modified_base 2: mod_base = OTHER; note = 2'-F modification
  modified_base 3..13: mod_base = OTHER; note = 2'-Ome modification
  modified_base 14: mod_base = OTHER; note = 2'-F modification
  modified_base 15: mod_base = OTHER; note = 2'-Ome modification
  modified_base 16: mod_base = OTHER; note = 2'-F modification
  modified_base 17..23: mod_base = OTHER; note = 2'-Ome modification
  modified_base 1..2: mod_base = OTHER; note = Phosphorothioate connection
  modified_base 2..3: mod_base = OTHER; note = Phosphorothioate connection
  modified_base 21..22: mod_base = OTHER; note = Phosphorothioate connection
  modified_base 22..23: mod_base = OTHER; note = Phosphorothioate connection
  source 1..23: mol_type = other RNA
aaacaggtctagaaaagttggta

SEQ ID NO: 1151 - RNA, 23 nt, synthetic construct
  misc_feature 1..23: note = SP341.3MW02antisense
  modified_base 1: mod_base = OTHER; note = 2'-Ome modification
  modified_base 2: mod_base = OTHER; note = 2'-F modification
  modified_base 3..13: mod_base = OTHER; note = 2'-Ome modification
  modified_base 14: mod_base = OTHER; note = 2'-F modification
  modified_base 15: mod_base = OTHER; note = 2'-Ome modification
  modified_base 16: mod_base = OTHER; note = 2'-F modification
  modified_base 17..23: mod_base = OTHER; note = 2'-Ome modification
  modified_base 1..2: mod_base = OTHER; note = Phosphorothioate connection
  modified_base 2..3: mod_base = OTHER; note = Phosphorothioate connection
  modified_base 21..22: mod_base = OTHER; note = Phosphorothioate connection
  modified_base 22..23: mod_base = OTHER; note = Phosphorothioate connection
  source 1..23: mol_type = other RNA
aaacaggtctagaaaagttggat

SEQ ID NO: 1152 - RNA, 23 nt, synthetic construct
  misc_feature 1..23: note = SP341.4MW02antisense
  modified_base 1: mod_base = OTHER; note = 2'-Ome modification
  modified_base 2: mod_base = OTHER; note = 2'-F modification
  modified_base 3..13: mod_base = OTHER; note = 2'-Ome modification
  modified_base 14: mod_base = OTHER; note = 2'-F modification
  modified_base 15: mod_base = OTHER; note = 2'-Ome modification
  modified_base 16: mod_base = OTHER; note = 2'-F modification
  modified_base 17..23: mod_base = OTHER; note = 2'-Ome modification
  modified_base 1..2: mod_base = OTHER; note = Phosphorothioate connection
  modified_base 2..3: mod_base = OTHER; note = Phosphorothioate connection
  modified_base 21..22: mod_base = OTHER; note = Phosphorothioate connection
  modified_base 22..23: mod_base = OTHER; note = Phosphorothioate connection
  source 1..23: mol_type = other RNA
aaacaggtctagaaaagttggaa

SEQ ID NO: 1153 - RNA, 23 nt, synthetic construct
  misc_feature 1..23: note = SP341.5MW02antisense
  modified_base 1: mod_base = OTHER; note = 2'-Ome modification
  modified_base 2: mod_base = OTHER; note = 2'-F modification
  modified_base 3..13: mod_base = OTHER; note = 2'-Ome modification
  modified_base 14: mod_base = OTHER; note = 2'-F modification
  modified_base 15: mod_base = OTHER; note = 2'-Ome modification
  modified_base 16: mod_base = OTHER; note = 2'-F modification
  modified_base 17..23: mod_base = OTHER; note = 2'-Ome modification
  modified_base 1..2: mod_base = OTHER; note = Phosphorothioate connection
  modified_base 2..3: mod_base = OTHER; note = Phosphorothioate connection
  modified_base 21..22: mod_base = OTHER; note = Phosphorothioate connection
  modified_base 22..23: mod_base = OTHER; note = Phosphorothioate connection
  source 1..23: mol_type = other RNA
aaacaggtctagaaaagttggca

SEQ ID NO: 1154 - RNA, 23 nt, synthetic construct
  misc_feature 1..23: note = SP341.6MW02antisense
  modified_base 1: mod_base = OTHER; note = 2'-Ome modification
  modified_base 2: mod_base = OTHER; note = 2'-F modification
  modified_base 3..13: mod_base = OTHER; note = 2'-Ome modification
  modified_base 14: mod_base = OTHER; note = 2'-F modification
  modified_base 15: mod_base = OTHER; note = 2'-Ome modification
  modified_base 16: mod_base = OTHER; note = 2'-F modification
  modified_base 17..23: mod_base = OTHER; note = 2'-Ome modification
  modified_base 1..2: mod_base = OTHER; note = Phosphorothioate connection
  modified_base 2..3: mod_base = OTHER; note = Phosphorothioate connection
  modified_base 21..22: mod_base = OTHER; note = Phosphorothioate connection
  modified_base 22..23: mod_base = OTHER; note = Phosphorothioate connection
  source 1..23: mol_type = other RNA
taacaggtctagaaaagttggct

SEQ ID NO: 1155 - RNA, 23 nt, synthetic construct
  misc_feature 1..23: note = SP341.7MW02antisense
  modified_base 1: mod_base = OTHER; note = 2'-Ome modification
  modified_base 2: mod_base = OTHER; note = 2'-F modification
  modified_base 3..13: mod_base = OTHER; note = 2'-Ome modification
  modified_base 14: mod_base = OTHER; note = 2'-F modification
  modified_base 15: mod_base = OTHER; note = 2'-Ome modification
  modified_base 16: mod_base = OTHER; note = 2'-F modification
  modified_base 17..23: mod_base = OTHER; note = 2'-Ome modification
  modified_base 1..2: mod_base = OTHER; note = Phosphorothioate connection
  modified_base 2..3: mod_base = OTHER; note = Phosphorothioate connection
  modified_base 21..22: mod_base = OTHER; note = Phosphorothioate connection
  modified_base 22..23: mod_base = OTHER; note = Phosphorothioate connection
  source 1..23: mol_type = other RNA
taacaggtctagaaaagttggtt

SEQ ID NO: 1156 - RNA, 23 nt, synthetic construct
  misc_feature 1..23: note = SP341.8MW02antisense
  modified_base 1: mod_base = OTHER; note = 2'-Ome modification
  modified_base 2: mod_base = OTHER; note = 2'-F modification
  modified_base 3..13: mod_base = OTHER; note = 2'-Ome modification
  modified_base 14: mod_base = OTHER; note = 2'-F modification
  modified_base 15: mod_base = OTHER; note = 2'-Ome modification
  modified_base 16: mod_base = OTHER; note = 2'-F modification
  modified_base 17..23: mod_base = OTHER; note = 2'-Ome modification
  modified_base 1..2: mod_base = OTHER; note = Phosphorothioate connection
  modified_base 2..3: mod_base = OTHER; note = Phosphorothioate connection
  modified_base 21..22: mod_base = OTHER; note = Phosphorothioate connection
  modified_base 22..23: mod_base = OTHER; note = Phosphorothioate connection
  source 1..23: mol_type = other RNA
taacaggtctagaaaagttggta

SEQ ID NO: 1157 - RNA, 23 nt, synthetic construct
  misc_feature 1..23: note = SP341.9MW02antisense
  modified_base 1: mod_base = OTHER; note = 2'-Ome modification
  modified_base 2: mod_base = OTHER; note = 2'-F modification
  modified_base 3..13: mod_base = OTHER; note = 2'-Ome modification
  modified_base 14: mod_base = OTHER; note = 2'-F modification
  modified_base 15: mod_base = OTHER; note = 2'-Ome modification
  modified_base 16: mod_base = OTHER; note = 2'-F modification
  modified_base 17..23: mod_base = OTHER; note = 2'-Ome modification
  modified_base 1..2: mod_base = OTHER; note = Phosphorothioate connection
  modified_base 2..3: mod_base = OTHER; note = Phosphorothioate connection
  modified_base 21..22: mod_base = OTHER; note = Phosphorothioate connection
  modified_base 22..23: mod_base = OTHER; note = Phosphorothioate connection
  source 1..23: mol_type = other RNA
taacaggtctagaaaagttggat

SEQ ID NO: 1158 - RNA, 23 nt, synthetic construct
  misc_feature 1..23: note = SP341.10MW02antisense
  modified_base 1: mod_base = OTHER; note = 2'-Ome modification
  modified_base 2: mod_base = OTHER; note = 2'-F modification
  modified_base 3..13: mod_base = OTHER; note = 2'-Ome modification
  modified_base 14: mod_base = OTHER; note = 2'-F modification
  modified_base 15: mod_base = OTHER; note = 2'-Ome modification
  modified_base 16: mod_base = OTHER; note = 2'-F modification
  modified_base 17..23: mod_base = OTHER; note = 2'-Ome modification
  modified_base 1..2: mod_base = OTHER; note = Phosphorothioate connection
  modified_base 2..3: mod_base = OTHER; note = Phosphorothioate connection
  modified_base 21..22: mod_base = OTHER; note = Phosphorothioate connection
  modified_base 22..23: mod_base = OTHER; note = Phosphorothioate connection
  source 1..23: mol_type = other RNA
taacaggtctagaaaagttggaa

SEQ ID NO: 1159 - RNA, 23 nt, synthetic construct
  misc_feature 1..23: note = SP341.11MW02antisense
  modified_base 1: mod_base = OTHER; note = 2'-Ome modification
  modified_base 2: mod_base = OTHER; note = 2'-F modification
  modified_base 3..13: mod_base = OTHER; note = 2'-Ome modification
  modified_base 14: mod_base = OTHER; note = 2'-F modification
  modified_base 15: mod_base = OTHER; note = 2'-Ome modification
  modified_base 16: mod_base = OTHER; note = 2'-F modification
  modified_base 17..23: mod_base = OTHER; note = 2'-Ome modification
  modified_base 1..2: mod_base = OTHER; note = Phosphorothioate connection
  modified_base 2..3: mod_base = OTHER; note = Phosphorothioate connection
  modified_base 21..22: mod_base = OTHER; note = Phosphorothioate connection
  modified_base 22..23: mod_base = OTHER; note = Phosphorothioate connection
  source 1..23: mol_type = other RNA
taacaggtctagaaaagttggca

SEQ ID NO: 1160 - RNA, 23 nt, synthetic construct
  misc_feature 1..23: note = Ps3543.1MW02antisense
  modified_base 1: mod_base = OTHER; note = 2'-Ome modification
  modified_base 2: mod_base = OTHER; note = 2'-F modification
  modified_base 3..13: mod_base = OTHER; note = 2'-Ome modification
  modified_base 14: mod_base = OTHER; note = 2'-F modification
  modified_base 15: mod_base = OTHER; note = 2'-Ome modification
  modified_base 16: mod_base = OTHER; note = 2'-F modification
  modified_base 17..23: mod_base = OTHER; note = 2'-Ome modification
  modified_base 1..2: mod_base = OTHER; note = Phosphorothioate connection
  modified_base 2..3: mod_base = OTHER; note = Phosphorothioate connection
  modified_base 21..22: mod_base = OTHER; note = Phosphorothioate connection
  modified_base 22..23: mod_base = OTHER; note = Phosphorothioate connection
  source 1..23: mol_type = other RNA
aatatcttcaagttacaaaagta

SEQ ID NO: 1161 - RNA, 23 nt, synthetic construct
  misc_feature 1..23: note = Ps3543.2MW02antisense
  modified_base 1: mod_base = OTHER; note = 2'-Ome modification
  modified_base 2: mod_base = OTHER; note = 2'-F modification
  modified_base 3..13: mod_base = OTHER; note = 2'-Ome modification
  modified_base 14: mod_base = OTHER; note = 2'-F modification
  modified_base 15: mod_base = OTHER; note = 2'-Ome modification
  modified_base 16: mod_base = OTHER; note = 2'-F modification
  modified_base 17..23: mod_base = OTHER; note = 2'-Ome modification
  modified_base 1..2: mod_base = OTHER; note = Phosphorothioate connection
  modified_base 2..3: mod_base = OTHER; note = Phosphorothioate connection
  modified_base 21..22: mod_base = OTHER; note = Phosphorothioate connection
  modified_base 22..23: mod_base = OTHER; note = Phosphorothioate connection
  source 1..23: mol_type = other RNA
aatatcttcaagttacaaaagtt

SEQ ID NO: 1162 - RNA, 23 nt, synthetic construct
  misc_feature 1..23: note = Ps3543.3MW02antisense
  modified_base 1: mod_base = OTHER; note = 2'-Ome modification
  modified_base 2: mod_base = OTHER; note = 2'-F modification
  modified_base 3..13: mod_base = OTHER; note = 2'-Ome modification
  modified_base 14: mod_base = OTHER; note = 2'-F modification
  modified_base 15: mod_base = OTHER; note = 2'-Ome modification
  modified_base 16: mod_base = OTHER; note = 2'-F modification
  modified_base 17..23: mod_base = OTHER; note = 2'-Ome modification
  modified_base 1..2: mod_base = OTHER; note = Phosphorothioate connection
  modified_base 2..3: mod_base = OTHER; note = Phosphorothioate connection
  modified_base 21..22: mod_base = OTHER; note = Phosphorothioate connection
  modified_base 22..23: mod_base = OTHER; note = Phosphorothioate connection
  source 1..23: mol_type = other RNA
aatatcttcaagttacaaaagaa

SEQ ID NO: 1163 - RNA, 23 nt, synthetic construct
  misc_feature 1..23: note = Ps3543.4MW02antisense
  modified_base 1: mod_base = OTHER; note = 2'-Ome modification
  modified_base 2: mod_base = OTHER; note = 2'-F modification
  modified_base 3..13: mod_base = OTHER; note = 2'-Ome modification
  modified_base 14: mod_base = OTHER; note = 2'-F modification
  modified_base 15: mod_base = OTHER; note = 2'-Ome modification
  modified_base 16: mod_base = OTHER; note = 2'-F modification
  modified_base 17..23: mod_base = OTHER; note = 2'-Ome modification
  modified_base 1..2: mod_base = OTHER; note = Phosphorothioate connection
  modified_base 2..3: mod_base = OTHER; note = Phosphorothioate connection
  modified_base 21..22: mod_base = OTHER; note = Phosphorothioate connection
  modified_base 22..23: mod_base = OTHER; note = Phosphorothioate connection
  source 1..23: mol_type = other RNA
aatatcttcaagttacaaaagat

SEQ ID NO: 1164 - RNA, 23 nt, synthetic construct
  misc_feature 1..23: note = Ps3543.5MW02antisense
  modified_base 1: mod_base = OTHER; note = 2'-Ome modification
  modified_base 2: mod_base = OTHER; note = 2'-F modification
  modified_base 3..13: mod_base = OTHER; note = 2'-Ome modification
  modified_base 14: mod_base = OTHER; note = 2'-F modification
  modified_base 15: mod_base = OTHER; note = 2'-Ome modification
  modified_base 16: mod_base = OTHER; note = 2'-F modification
  modified_base 17..23: mod_base = OTHER; note = 2'-Ome modification
  modified_base 1..2: mod_base = OTHER; note = Phosphorothioate connection
  modified_base 2..3: mod_base = OTHER; note = Phosphorothioate connection
  modified_base 21..22: mod_base = OTHER; note = Phosphorothioate connection
  modified_base 22..23: mod_base = OTHER; note = Phosphorothioate connection
  source 1..23: mol_type = other RNA
aatatcttcaagttacaaaagct

SEQ ID NO: 1165 - RNA, 23 nt, synthetic construct
  misc_feature 1..23: note = Ps3543.6MW02antisense
  modified_base 1: mod_base = OTHER; note = 2'-Ome modification
  modified_base 2: mod_base = OTHER; note = 2'-F modification
  modified_base 3..13: mod_base = OTHER; note = 2'-Ome modification
  modified_base 14: mod_base = OTHER; note = 2'-F modification
  modified_base 15: mod_base = OTHER; note = 2'-Ome modification
  modified_base 16: mod_base = OTHER; note = 2'-F modification
  modified_base 17..23: mod_base = OTHER; note = 2'-Ome modification
  modified_base 1..2: mod_base = OTHER; note = Phosphorothioate connection
  modified_base 2..3: mod_base = OTHER; note = Phosphorothioate connection
  modified_base 21..22: mod_base = OTHER; note = Phosphorothioate connection
  modified_base 22..23: mod_base = OTHER; note = Phosphorothioate connection
  source 1..23: mol_type = other RNA
tatatcttcaagttacaaaagca

SEQ ID NO: 1166 - RNA, 23 nt, synthetic construct
  misc_feature 1..23: note = Ps3543.7MW02antisense
  modified_base 1: mod_base = OTHER; note = 2'-Ome modification
  modified_base 2: mod_base = OTHER; note = 2'-F modification
  modified_base 3..13: mod_base = OTHER; note = 2'-Ome modification
  modified_base 14: mod_base = OTHER; note = 2'-F modification
  modified_base 15: mod_base = OTHER; note = 2'-Ome modification
  modified_base 16: mod_base = OTHER; note = 2'-F modification
  modified_base 17..23: mod_base = OTHER; note = 2'-Ome modification
  modified_base 1..2: mod_base = OTHER; note = Phosphorothioate connection
  modified_base 2..3: mod_base = OTHER; note = Phosphorothioate connection
  modified_base 21..22: mod_base = OTHER; note = Phosphorothioate connection
  modified_base 22..23: mod_base = OTHER; note = Phosphorothioate connection
  source 1..23: mol_type = other RNA
tatatcttcaagttacaaaagta

SEQ ID NO: 1167 - RNA, 23 nt, synthetic construct
  misc_feature 1..23: note = Ps3543.8MW02antisense
  modified_base 1: mod_base = OTHER; note = 2'-Ome modification
  modified_base 2: mod_base = OTHER; note = 2'-F modification
  modified_base 3..13: mod_base = OTHER; note = 2'-Ome modification
  modified_base 14: mod_base = OTHER; note = 2'-F modification
  modified_base 15: mod_base = OTHER; note = 2'-Ome modification
  modified_base 16: mod_base = OTHER; note = 2'-F modification
  modified_base 17..23: mod_base = OTHER; note = 2'-Ome modification
  modified_base 1..2: mod_base = OTHER; note = Phosphorothioate connection
  modified_base 2..3: mod_base = OTHER; note = Phosphorothioate connection
  modified_base 21..22: mod_base = OTHER; note = Phosphorothioate connection
  modified_base 22..23: mod_base = OTHER; note = Phosphorothioate connection
  source 1..23: mol_type = other RNA
tatatcttcaagttacaaaagtt

SEQ ID NO: 1168 - RNA, 23 nt, synthetic construct
  misc_feature 1..23: note = Ps3543.9MW02antisense
  modified_base 1: mod_base = OTHER; note = 2'-Ome modification
  modified_base 2: mod_base = OTHER; note = 2'-F modification
  modified_base 3..13: mod_base = OTHER; note = 2'-Ome modification
  modified_base 14: mod_base = OTHER; note = 2'-F modification
  modified_base 15: mod_base = OTHER; note = 2'-Ome modification
  modified_base 16: mod_base = OTHER; note = 2'-F modification
  modified_base 17..23: mod_base = OTHER; note = 2'-Ome modification
  modified_base 1..2: mod_base = OTHER; note = Phosphorothioate connection
  modified_base 2..3: mod_base = OTHER; note = Phosphorothioate connection
  modified_base 21..22: mod_base = OTHER; note = Phosphorothioate connection
  modified_base 22..23: mod_base = OTHER; note = Phosphorothioate connection
  source 1..23: mol_type = other RNA
tatatcttcaagttacaaaagaa

SEQ ID NO: 1169 - RNA, 23 nt, synthetic construct
  misc_feature 1..23: note = Ps3543.10MW02antisense
  modified_base 1: mod_base = OTHER; note = 2'-Ome modification
  modified_base 2: mod_base = OTHER; note = 2'-F modification
  modified_base 3..13: mod_base = OTHER; note = 2'-Ome modification
  modified_base 14: mod_base = OTHER; note = 2'-F modification
  modified_base 15: mod_base = OTHER; note = 2'-Ome modification
  modified_base 16: mod_base = OTHER; note = 2'-F modification
  modified_base 17..23: mod_base = OTHER; note = 2'-Ome modification
  modified_base 1..2: mod_base = OTHER; note = Phosphorothioate connection
  modified_base 2..3: mod_base = OTHER; note = Phosphorothioate connection
  modified_base 21..22: mod_base = OTHER; note = Phosphorothioate connection
  modified_base 22..23: mod_base = OTHER; note = Phosphorothioate connection
  source 1..23: mol_type = other RNA
tatatcttcaagttacaaaagat

SEQ ID NO: 1170 - RNA, 23 nt, synthetic construct
  misc_feature 1..23: note = Ps3543.11MW02antisense
  modified_base 1: mod_base = OTHER; note = 2'-Ome modification
  modified_base 2: mod_base = OTHER; note = 2'-F modification
  modified_base 3..13: mod_base = OTHER; note = 2'-Ome modification
  modified_base 14: mod_base = OTHER; note = 2'-F modification
  modified_base 15: mod_base = OTHER; note = 2'-Ome modification
  modified_base 16: mod_base = OTHER; note = 2'-F modification
  modified_base 17..23: mod_base = OTHER; note = 2'-Ome modification
  modified_base 1..2: mod_base = OTHER; note = Phosphorothioate connection
  modified_base 2..3: mod_base = OTHER; note = Phosphorothioate connection
  modified_base 21..22: mod_base = OTHER; note = Phosphorothioate connection
  modified_base 22..23: mod_base = OTHER; note = Phosphorothioate connection
  source 1..23: mol_type = other RNA
tatatcttcaagttacaaaagct

SEQ ID NO: 1171 - RNA, 21 nt, synthetic construct
  misc_feature 1..21: note = LPA sense
  source 1..21: mol_type = other RNA
ggtgatggacagagttatcga

SEQ ID NO: 1172 - RNA, 23 nt, synthetic construct
  misc_feature 1..23: note = LPA antisense
  source 1..23: mol_type = other RNA
tcgataactctgtccatcacctc

SEQ ID NO: 1173 - RNA, 21 nt, synthetic construct
  misc_feature 1..21: note = LPA sense
  modified_base 1..6: mod_base = OTHER; note = 2'-ome modification
  modified_base 7: mod_base = OTHER; note = 2'-f modification
  modified_base 8: mod_base = OTHER; note = 2'-ome modification
  modified_base 9..11: mod_base = OTHER; note = 2'-f modification
  modified_base 12..21: mod_base = OTHER; note = 2'-ome modification
  modified_base 1..2: mod_base = OTHER; note = phosphorothioate connection
  modified_base 2..3: mod_base = OTHER; note = phosphorothioate connection
  source 1..21: mol_type = other RNA
ggtgatggacagagttatcga

SEQ ID NO: 1174 - RNA, 23 nt, synthetic construct
  misc_feature 1..23: note = LPA antisense
  modified_base 1: mod_base = OTHER; note = 2'-ome modification
  modified_base 2: mod_base = OTHER; note = 2'-f modification
  modified_base 3..13: mod_base = OTHER; note = 2'-ome modification
  modified_base 14: mod_base = OTHER; note = 2'-f modification
  modified_base 15: mod_base = OTHER; note = 2'-ome modification
  modified_base 16: mod_base = OTHER; note = 2'-f modification
  modified_base 17..23: mod_base = OTHER; note = 2'-ome modification
  modified_base 1..2: mod_base = OTHER; note = phosphorothioate connection
  modified_base 2..3: mod_base = OTHER; note = phosphorothioate connection
  modified_base 21..22: mod_base = OTHER; note = phosphorothioate connection
  modified_base 22..23: mod_base = OTHER; note = phosphorothioate connection
  source 1..23: mol_type = other RNA
tcgataactctgtccatcacctc

SEQ ID NO: 1175 - RNA, 21 nt, synthetic construct
  misc_feature 1..21: note = SP341MW02-L1-L4230MW02sense 1
  modified_base 1..6: mod_base = OTHER; note = 2'-ome modification
  modified_base 7: mod_base = OTHER; note = 2'-f modification
  modified_base 8: mod_base = OTHER; note = 2'-ome modification
  modified_base 9..11: mod_base = OTHER; note = 2'-f modification
  modified_base 12..21: mod_base = OTHER; note = 2'-ome modification
  modified_base 1..2: mod_base = OTHER; note = phosphorothioate connection
  modified_base 2..3: mod_base = OTHER; note = phosphorothioate connection
  modified_base 19..20: mod_base = OTHER; note = phosphorothioate connection
  modified_base 20..21: mod_base = OTHER; note = phosphorothioate connection
  source 1..21: mol_type = other RNA
ggtgatggacagagttatcga

SEQ ID NO: 1176 - RNA, 45 nt, synthetic construct
  misc_feature 1..45: note = SP341MW02-L3a1-L4230MW02
  modified_base 1..6: mod_base = OTHER; note = 2'-ome modification
  modified_base 7: mod_base = OTHER; note = 2'-f modification
  modified_base 8: mod_base = OTHER; note = 2'-ome modification
  modified_base 9..11: mod_base = OTHER; note = 2'-f modification
  modified_base 12..30: mod_base = OTHER; note = 2'-ome modification
  modified_base 31: mod_base = OTHER; note = 2'-f modification
  modified_base 32: mod_base = OTHER; note = 2'-ome modification
  modified_base 33..35: mod_base = OTHER; note = 2'-f modification
  modified_base 36..45: mod_base = OTHER; note = 2'-ome modification
  modified_base 1..2: mod_base = OTHER; note = phosphorothioate connection
  modified_base 2..3: mod_base = OTHER; note = phosphorothioate connection
  modified_base 19..20: mod_base = OTHER; note = phosphorothioate connection
  modified_base 20..21: mod_base = OTHER; note = phosphorothioate connection
  modified_base 25..26: mod_base = OTHER; note = phosphorothioate connection
  modified_base 26..27: mod_base = OTHER; note = phosphorothioate connection
  source 1..45: mol_type = other RNA
ccaacttttctagacctgttttttggtgatggacagagttatcga

SEQ ID NO: 1177 - RNA, 48 nt, synthetic construct
  misc_feature 1..48: note = SP341MW02-L3a2-L4230MW02
  modified_base 1..6: mod_base = OTHER; note = 2'-ome modification
  modified_base 7: mod_base = OTHER; note = 2'-f modification
  modified_base 8: mod_base = OTHER; note = 2'-ome modification
  modified_base 9..11: mod_base = OTHER; note = 2'-f modification
  modified_base 12..33: mod_base = OTHER; note = 2'-ome modification
  modified_base 34: mod_base = OTHER; note = 2'-f modification
  modified_base 35: mod_base = OTHER; note = 2'-ome modification
  modified_base 36..38: mod_base = OTHER; note = 2'-f modification
  modified_base 39..48: mod_base = OTHER; note = 2'-ome modification
  modified_base 1..2: mod_base = OTHER; note = phosphorothioate connection
  modified_base 2..3: mod_base = OTHER; note = phosphorothioate connection
  modified_base 19..20: mod_base = OTHER; note = phosphorothioate connection
  modified_base 20..21: mod_base = OTHER; note = phosphorothioate connection
  modified_base 28..29: mod_base = OTHER; note = phosphorothioate connection
  modified_base 29..30: mod_base = OTHER; note = phosphorothioate connection
  source 1..48: mol_type = other RNA
ccaacttttctagacctgtttttttttggtgatggacagagttatcga

SEQ ID NO: 1178 - RNA, 21 nt, synthetic construct
  misc_feature 1..21: note = SP345MW02 sense 2
  modified_base 1..6: mod_base = OTHER; note = 2'-ome modification
  modified_base 7: mod_base = OTHER; note = 2'-f modification
  modified_base 8: mod_base = OTHER; note = 2'-ome modification
  modified_base 9..11: mod_base = OTHER; note = 2'-f modification
  modified_base 12..21: mod_base = OTHER; note = 2'-ome modification
  modified_base 1..2: mod_base = OTHER; note = phosphorothioate connection
  modified_base 2..3: mod_base = OTHER; note = phosphorothioate connection
  modified_base 20..21: mod_base = OTHER; note = phosphorothioate connection
  modified_base 21: mod_base = OTHER; note = phosphorothioate modification
  source 1..21: mol_type = other RNA
cttttctagacctgttttgct

SEQ ID NO: 1179 - RNA, 21 nt, synthetic construct
  misc_feature 1..21: note = AP503MW02 sense
  modified_base 1..6: mod_base = OTHER; note = 2'-ome modification
  modified_base 7: mod_base = OTHER; note = 2'-f modification
  modified_base 8: mod_base = OTHER; note = 2'-ome modification
  modified_base 9..11: mod_base = OTHER; note = 2'-f modification
  modified_base 12..21: mod_base = OTHER; note = 2'-ome modification
  modified_base 1..2: mod_base = OTHER; note = phosphorothioate connection
  modified_base 2..3: mod_base = OTHER; note = phosphorothioate connection
  source 1..21: mol_type = other RNA
cccaataaagctggacaagaa

SEQ ID NO: 1180 - RNA, 48 nt, synthetic construct
  misc_feature 1..48: note = dual target 6 sense 1
  modified_base 1..6: mod_base = OTHER; note = 2'-ome modification
  modified_base 7: mod_base = OTHER; note = 2'-f modification
  modified_base 8: mod_base = OTHER; note = 2'-ome modification
  modified_base 9..11: mod_base = OTHER; note = 2'-f modification
  modified_base 12..21: mod_base = OTHER; note = 2'-ome modification
  modified_base 22..27: mod_base = OTHER; note = deoxynucleotide
  modified_base 28..33: mod_base = OTHER; note = 2'-ome modification
  modified_base 34: mod_base = OTHER; note = 2'-f modification
  modified_base 36..38: mod_base = OTHER; note = 2'-ome modification, 2'-f modification
  modified_base 39..48: mod_base = OTHER; note = 2'-ome modification
  modified_base 1..2: mod_base = OTHER; note = phosphorothioate connection
  modified_base 2..3: mod_base = OTHER; note = phosphorothioate connection
  modified_base 20..21: mod_base = OTHER; note = phosphorothioate connection
  modified_base 21..22: mod_base = OTHER; note = phosphorothioate connection
  modified_base 27..28: mod_base = OTHER; note = phosphorothioate connection
  modified_base 28..29: mod_base = OTHER; note = phosphorothioate connection
  source 1..48: mol_type = other RNA
cttttctagacctgttttgctaaaaaaggtgatggacagagttatcga

SEQ ID NO: 1181 - RNA, 48 nt, synthetic construct
  misc_feature 1..48: note = dual target 7 sense 2
  modified_base 1..6: mod_base = OTHER; note = 2'-ome modification
  modified_base 7: mod_base = OTHER; note = 2'-f modification
  modified_base 8: mod_base = OTHER; note = 2'-ome modification
  modified_base 9..11: mod_base = OTHER; note = 2'-f modification
  modified_base 12..21: mod_base = OTHER; note = 2'-ome modification
  modified_base 22..27: mod_base = OTHER; note = deoxynucleotide
  modified_base 28..33: mod_base = OTHER; note = 2'-ome modification
  modified_base 34: mod_base = OTHER; note = 2'-f modification
  modified_base 36..38: mod_base = OTHER; note = 2'-ome modification, 2'-f modification
  modified_base 39..48: mod_base = OTHER; note = 2'-ome modification
  modified_base 1..2: mod_base = OTHER; note = phosphorothioate connection
  modified_base 20..21: mod_base = OTHER; note = phosphorothioate connection
  modified_base 21..22: mod_base = OTHER; note = phosphorothioate connection
  modified_base 27..28: mod_base = OTHER; note = phosphorothioate connection
  modified_base 28..29: mod_base = OTHER; note = phosphorothioate connection
  source 1..48: mol_type = other RNA
ccaacttttctagacctgttaaaaaaaggacagagttatcgaggcaca

SEQ ID NO: 1182 - RNA, 23 nt, synthetic construct
  misc_feature 1..23: note = L840MW02 antisense
  modified_base 1: mod_base = OTHER; note = 2'-ome modification
  modified_base 2: mod_base = OTHER; note = 2'-f modification
  modified_base 3..13: mod_base = OTHER; note = 2'-ome modification
  modified_base 14: mod_base = OTHER; note = 2'-f modification
  modified_base 15: mod_base = OTHER; note = 2'-ome modification
  modified_base 16: mod_base = OTHER; note = 2'-f modification
  modified_base 17..23: mod_base = OTHER; note = 2'-ome modification
  modified_base 1..2: mod_base = OTHER; note = phosphorothioate connection
  modified_base 2..3: mod_base = OTHER; note = phosphorothioate connection
  modified_base 21..22: mod_base = OTHER; note = phosphorothioate connection
  modified_base 22..23: mod_base = OTHER; note = phosphorothioate connection
  source 1..23: mol_type = other RNA
tgtgcctcgataactctgtccat

SEQ ID NO: 1183 - RNA, 45 nt, synthetic construct
  misc_feature 1..45: note = AP503MW02-L3b(3A)-L4230MW02
  modified_base 1..6: mod_base = OTHER; note = 2'-ome modification
  modified_base 7: mod_base = OTHER; note = 2'-f modification
  modified_base 8: mod_base = OTHER; note = 2'-ome modification
  modified_base 9..11: mod_base = OTHER; note = 2'-f modification
  modified_base 12..21: mod_base = OTHER; note = 2'-ome modification
  modified_base 22..24: mod_base = OTHER; note = deoxynucleotide
  modified_base 25..30: mod_base = OTHER; note = 2'-ome modification
  modified_base 31: mod_base = OTHER; note = 2'-f modification
  modified_base 33..35: mod_base = OTHER; note = 2'-ome modification, 2'-f modification
  modified_base 36..45: mod_base = OTHER; note = 2'-ome modification
  modified_base 1..2: mod_base = OTHER; note = phosphorothioate connection
  modified_base 2..3: mod_base = OTHER; note = phosphorothioate connection
  modified_base 20..21: mod_base = OTHER; note = phosphorothioate connection
  modified_base 21..22: mod_base = OTHER; note = phosphorothioate connection
  modified_base 24..25: mod_base = OTHER; note = phosphorothioate connection
  modified_base 25..26: mod_base = OTHER; note = phosphorothioate connection
  source 1..45: mol_type = other RNA
cccaataaagctggacaagaaaaaggtgatggacagagttatcga

SEQ ID NO: 1184 - RNA, 23 nt, synthetic construct
  misc_feature 1..23: note = AP503MW02 antisense
  modified_base 1: mod_base = OTHER; note = 2'-ome modification
  modified_base 2: mod_base = OTHER; note = 2'-f modification
  modified_base 3..13: mod_base = OTHER; note = 2'-ome modification
  modified_base 14: mod_base = OTHER; note = 2'-f modification
  modified_base 15: mod_base = OTHER; note = 2'-ome modification
  modified_base 16: mod_base = OTHER; note = 2'-f modification
  modified_base 17..23: mod_base = OTHER; note = 2'-ome modification
  modified_base 1..2: mod_base = OTHER; note = phosphorothioate connection
  modified_base 2..3: mod_base = OTHER; note = phosphorothioate connection
  modified_base 21..22: mod_base = OTHER; note = phosphorothioate connection
  modified_base 22..23: mod_base = OTHER; note = phosphorothioate connection
  source 1..23: mol_type = other RNA
ttcttgtccagctttattgggag

SEQ ID NO: 1185 - RNA, 46 nt, synthetic construct
  misc_feature 1..46: note = AP503MW02-L3b(4A)-L4230MW02
  modified_base 1..6: mod_base = OTHER; note = 2'-ome modification
  modified_base 7: mod_base = OTHER; note = 2'-f modification
  modified_base 8: mod_base = OTHER; note = 2'-ome modification
  modified_base 9..11: mod_base = OTHER; note = 2'-f modification
  modified_base 12..21: mod_base = OTHER; note = 2'-ome modification
  modified_base 22..25: mod_base = OTHER; note = deoxynucleotide
  modified_base 26..31: mod_base = OTHER; note = 2'-ome modification
  modified_base 32: mod_base = OTHER; note = 2'-f modification
  modified_base 34..36: mod_base = OTHER; note = 2'-ome modification, 2'-f modification
  modified_base 37..46: mod_base = OTHER; note = 2'-ome modification
  modified_base 1..2: mod_base = OTHER; note = phosphorothioate connection
  modified_base 2..3: mod_base = OTHER; note = phosphorothioate connection
  modified_base 20..21: mod_base = OTHER; note = phosphorothioate connection
  modified_base 21..22: mod_base = OTHER; note = phosphorothioate connection
  modified_base 25..26: mod_base = OTHER; note = phosphorothioate connection
  modified_base 26..27: mod_base = OTHER; note = phosphorothioate connection
  source 1..46: mol_type = other RNA
cccaataaagctggacaagaaaaaaggtgatggacagagttatcga

SEQ ID NO: 1186 - RNA, 48 nt, synthetic construct
  misc_feature 1..48: note = AP503MW02-L3b-L4230MW02
  modified_base 1..6: mod_base = OTHER; note = 2'-ome modification
  modified_base 7: mod_base = OTHER; note = 2'-f modification
  modified_base 8: mod_base = OTHER; note = 2'-ome modification
  modified_base 9..11: mod_base = OTHER; note = 2'-f modification
  modified_base 12..21: mod_base = OTHER; note = 2'-ome modification
  modified_base 22..27: mod_base = OTHER; note = deoxynucleotide
  modified_base 28..33: mod_base = OTHER; note = 2'-ome modification
  modified_base 34: mod_base = OTHER; note = 2'-f modification
  modified_base 36..38: mod_base = OTHER; note = 2'-ome modification, 2'-f modification
  modified_base 39..48: mod_base = OTHER; note = 2'-ome modification
  modified_base 1..2: mod_base = OTHER; note = phosphorothioate connection
  modified_base 2..3: mod_base = OTHER; note = phosphorothioate connection
  modified_base 20..21: mod_base = OTHER; note = phosphorothioate connection
  modified_base 21..22: mod_base = OTHER; note = phosphorothioate connection
  modified_base 27..28: mod_base = OTHER; note = phosphorothioate connection
  modified_base 28..29: mod_base = OTHER; note = phosphorothioate connection
  source 1..48: mol_type = other RNA
cccaataaagctggacaagaaaaaaaaggtgatggacagagttatcga

SEQ ID NO: 1187 - RNA, 45 nt, synthetic construct
  modified_base 22..24: mod_base = OTHER; note = thymine
  misc_feature 1..45: note = AP503MW02-L3b(3T)-L4230MW02
  modified_base 1..6: mod_base = OTHER; note = 2'-ome modification
  modified_base 7: mod_base = OTHER; note = 2'-f modification
  modified_base 8: mod_base = OTHER; note = 2'-ome modification
  modified_base 9..11: mod_base = OTHER; note = 2'-f modification
  modified_base 12..21: mod_base = OTHER; note = 2'-ome modification
  modified_base 22..24: mod_base = OTHER; note = deoxynucleotide
  modified_base 25..30: mod_base = OTHER; note = 2'-ome modification
  modified_base 31: mod_base = OTHER; note = 2'-f modification
  modified_base 33..35: mod_base = OTHER; note = 2'-ome modification, 2'-f modification
  modified_base 36..45: mod_base = OTHER; note = 2'-ome modification
  modified_base 1..2: mod_base = OTHER; note = phosphorothioate connection
  modified_base 2..3: mod_base = OTHER; note = phosphorothioate connection
  modified_base 20..21: mod_base = OTHER; note = phosphorothioate connection
  modified_base 21..22: mod_base = OTHER; note = phosphorothioate connection
  modified_base 24..25: mod_base = OTHER; note = phosphorothioate connection
  modified_base 25..26: mod_base = OTHER; note = phosphorothioate connection
  source 1..45: mol_type = other RNA
cccaataaagctggacaagaatttggtgatggacagagttatcga

SEQ ID NO: 1188 - RNA, 46 nt, synthetic construct
  modified_base 22..25: mod_base = OTHER; note = thymine
  misc_feature 1..46: note = AP503MW02-L3b(4T)-L4230MW02
  modified_base 1..6: mod_base = OTHER; note = 2'-ome modification
  modified_base 7: mod_base = OTHER; note = 2'-f modification
  modified_base 8: mod_base = OTHER; note = 2'-ome modification
  modified_base 9..11: mod_base = OTHER; note = 2'-f modification
  modified_base 12..21: mod_base = OTHER; note = 2'-ome modification
  modified_base 22..25: mod_base = OTHER; note = deoxynucleotide
  modified_base 26..31: mod_base = OTHER; note = 2'-ome modification
  modified_base 32: mod_base = OTHER; note = 2'-f modification
  modified_base 34..36: mod_base = OTHER; note = 2'-ome modification, 2'-f modification
  modified_base 37..46: mod_base = OTHER; note = 2'-ome modification
  modified_base 1..2: mod_base = OTHER; note = phosphorothioate connection
  modified_base 2..3: mod_base = OTHER; note = phosphorothioate connection
  modified_base 20..21: mod_base = OTHER; note = phosphorothioate connection
  modified_base 21..22: mod_base = OTHER; note = phosphorothioate connection
  modified_base 25..26: mod_base = OTHER; note = phosphorothioate connection
  modified_base 26..27: mod_base = OTHER; note = phosphorothioate connection
  modified_base 27..28: mod_base = OTHER; note = phosphorothioate connection
  source 1..46: mol_type = other RNA
cccaataaagctggacaagaattttggtgatggacagagttatcga

SEQ ID NO: 1189 - RNA, 47 nt, synthetic construct
  modified_base 22..26: mod_base = OTHER; note = thymine
  misc_feature 1..47: note = AP503MW02-L3b(5T)-L4230MW02
  modified_base 1..6: mod_base = OTHER; note = 2'-ome modification
  modified_base 7: mod_base = OTHER; note = 2'-f modification
  modified_base 8: mod_base = OTHER; note = 2'-ome modification
  modified_base 9..11: mod_base = OTHER; note = 2'-f modification
  modified_base 12..21: mod_base = OTHER; note = 2'-ome modification
  modified_base 22..26: mod_base = OTHER; note = deoxynucleotide
  modified_base 27..32: mod_base = OTHER; note = 2'-ome modification
  modified_base 33: mod_base = OTHER; note = 2'-f modification
  modified_base 35..37: mod_base = OTHER; note = 2'-ome modification, 2'-f modification
  modified_base 38..47: mod_base = OTHER; note = 2'-ome modification
  modified_base 1..2: mod_base = OTHER; note = phosphorothioate connection
  modified_base 2..3: mod_base = OTHER; note = phosphorothioate connection
  modified_base 20..21: mod_base = OTHER; note = phosphorothioate connection
  modified_base 21..22: mod_base = OTHER; note = phosphorothioate connection
  modified_base 26..27: mod_base = OTHER; note = phosphorothioate connection
  modified_base 27..28: mod_base = OTHER; note = phosphorothioate connection
  source 1..47: mol_type = other RNA
cccaataaagctggacaagaatttttggtgatggacagagttatcga

SEQ ID NO: 1190 - RNA, 48 nt, synthetic construct
  modified_base 22..27: mod_base = OTHER; note = thymine
  misc_feature 1..48: note = AP503MW02-L3b(6T)-L4230MW02
  modified_base 1..6: mod_base = OTHER; note = 2'-ome modification
  modified_base 7: mod_base = OTHER; note = 2'-f modification
  modified_base 8: mod_base = OTHER; note = 2'-ome modification
  modified_base 9..11: mod_base = OTHER; note = 2'-f modification
  modified_base 12..21: mod_base = OTHER; note = 2'-ome modification
  modified_base 22..27: mod_base = OTHER; note = deoxynucleotide
  modified_base 28..33: mod_base = OTHER; note = 2'-ome modification
  modified_base 34: mod_base = OTHER; note = 2'-f modification
  modified_base 36..38: mod_base = OTHER; note = 2'-ome modification, 2'-f modification
  modified_base 39..48: mod_base = OTHER; note = 2'-ome modification
  modified_base 1..2: mod_base = OTHER; note = phosphorothioate connection
  modified_base 2..3: mod_base = OTHER; note = phosphorothioate connection
  modified_base 20..21: mod_base = OTHER; note = phosphorothioate connection
  modified_base 21..22: mod_base = OTHER; note = phosphorothioate connection
  modified_base 27..28: mod_base = OTHER; note = phosphorothioate connection
  modified_base 28..29: mod_base = OTHER; note = phosphorothioate connection
  source 1..48: mol_type = other RNA
cccaataaagctggacaagaattttttggtgatggacagagttatcga

SEQ ID NO: 1191 - DNA, 20 bp, synthetic construct
  misc_feature 1..20: note = primer 1
  source 1..20: mol_type = other DNA
aggagtgagccaggcagtga

SEQ ID NO: 1192 - DNA, 20 bp, synthetic construct
  misc_feature 1..20: note = primer 2
  source 1..20: mol_type = other DNA
aggactgtgcaggagctgga

SEQ ID NO: 1193 - DNA, 15 bp, synthetic construct
  misc_feature 1..15: note = primer 3
  source 1..15: mol_type = other DNA
gccggacgtgttcgc

SEQ ID NO: 1194 - DNA, 24 bp, synthetic construct
  misc_feature 1..24: note = primer 4
  source 1..24: mol_type = other DNA
tggcaacaatatccactttaccag

SEQ ID NO: 1195 - DNA, 20 bp, synthetic construct
  misc_feature 1..20: note = primer 5
  source 1..20: mol_type = other DNA
cgttggctacccgtgatatt

SEQ ID NO: 1196 - DNA, 22 bp, synthetic construct
  misc_feature 1..22: note = primer 6
  source 1..22: mol_type = other DNA
ctcgtcaagaaggcgatagaag

SEQ ID NO: 1197 - DNA, 24 bp, synthetic construct
  misc_feature 1..24: note = primer 7
  source 1..24: mol_type = other DNA
ccgcttcctcgtgctttacggtat

SEQ ID NO: 1198 - RNA, 21 nt, synthetic construct
  misc_feature 1..21: note = PCC1 sense
  modified_base 1..6: mod_base = OTHER; note = 2'-ome modification
  modified_base 7: mod_base = OTHER; note = 2'-f modification
  modified_base 8: mod_base = OTHER; note = 2'-ome modification
  modified_base 9..11: mod_base = OTHER; note = 2'-f modification
  modified_base 12..21: mod_base = OTHER; note = 2'-ome modification
  modified_base 1..2: mod_base = OTHER; note = phosphorothioate connection
  modified_base 2..3: mod_base = OTHER; note = phosphorothioate connection
  source 1..21: mol_type = other RNA
ctgttttgcttttgtaacttg

SEQ ID NO: 1199 - RNA, 23 nt, synthetic construct
  misc_feature 1..23: note = PCC1 antisense
  modified_base 1: mod_base = OTHER; note = 2'-ome modification
  modified_base 2: mod_base = OTHER; note = 2'-f modification
  modified_base 3..5: mod_base = OTHER; note = 2'-ome modification
  modified_base 6: mod_base = OTHER; note = 2'-f modification
  modified_base 7..13: mod_base = OTHER; note = 2'-ome modification
  modified_base 14: mod_base = OTHER; note = 2'-f modification
  modified_base 15: mod_base = OTHER; note = 2'-ome modification
  modified_base 16: mod_base = OTHER; note = 2'-f modification
  modified_base 17..23: mod_base = OTHER; note = 2'-ome modification
  modified_base 1..2: mod_base = OTHER; note = phosphorothioate connection
  modified_base 2..3: mod_base = OTHER; note = phosphorothioate connection
  modified_base 20..21: mod_base = OTHER; note = phosphorothioate connection
  modified_base 21..22: mod_base = OTHER; note = phosphorothioate connection
  modified_base 22..23: mod_base = OTHER; note = phosphorothioate connection
  source 1..23: mol_type = other RNA
caagttacaaaagcaaaacaggt

SEQ ID NO: 1200 - RNA, 21 nt, synthetic construct
  modified_base 11: mod_base = OTHER; note = thymine
  misc_feature 1..21: note = PCC2 sense
  modified_base 1..6: mod_base = OTHER; note = 2'-ome modification
  modified_base 7: mod_base = OTHER; note = 2'-f modification
  modified_base 8: mod_base = OTHER; note = 2'-ome modification
  modified_base 9: mod_base = OTHER; note = 2'-f modification
  modified_base 10: mod_base = OTHER; note = 2'-ome modification
  modified_base 11: mod_base = OTHER; note = deoxynucleotide
  modified_base 12..21: mod_base = OTHER; note = 2'-ome modification
  modified_base 1..2: mod_base = OTHER; note = phosphorothioate connection
  modified_base 2..3: mod_base = OTHER; note = phosphorothioate connection
  source 1..21: mol_type = other RNA
ctagacctgttttgcttttgt

SEQ ID NO: 1201 - RNA, 23 nt, synthetic construct
  misc_feature 1..23: note = PCC2 antisense
  modified_base 1: mod_base = OTHER; note = 2'-ome modification
  modified_base 2: mod_base = OTHER; note = 2'-f modification
  modified_base 3: mod_base = OTHER; note = 2'-ome modification
  modified_base 4..6: mod_base = OTHER; note = 2'-f modification
  modified_base 7: mod_base = OTHER; note = 2'-ome modification
  modified_base 8: mod_base = OTHER; note = 2'-f modification
  modified_base 9: mod_base = OTHER; note = 2'-ome modification
  modified_base 10: mod_base = OTHER; note = 2'-f modification
  modified_base 11: mod_base = OTHER; note = 2'-ome modification
  modified_base 12: mod_base = OTHER; note = 2'-f modification
  modified_base 13: mod_base = OTHER; note = 2'-ome modification
  modified_base 14: mod_base = OTHER; note = 2'-f modification
  modified_base 15: mod_base = OTHER; note = 2'-ome modification
  modified_base 16: mod_base = OTHER; note = 2'-f modification
  modified_base 17: mod_base = OTHER; note = 2'-ome modification
  modified_base 18: mod_base = OTHER; note = 2'-f modification
  modified_base 19..23: mod_base = OTHER; note = 2'-ome modification
  modified_base 1..2: mod_base = OTHER; note = phosphorothioate connection
  modified_base 2..3: mod_base = OTHER; note = phosphorothioate connection
  modified_base 21..22: mod_base = OTHER; note = phosphorothioate connection
  modified_base 22..23: mod_base = OTHER; note = phosphorothioate connection
  source 1..23: mol_type = other RNA
acaaaagcaaaacaggtctagaa